(19) United States
(12) Patent Application Publication
(10) Pub. No.: US 2021/0353543 A1
(43) Pub. Date: Nov. 18, 2021

(54) TARGETED LIPID PARTICLES AND COMPOSITIONS AND USES THEREOF

(71) Applicants: Sana Biotechnology, Inc., Seattle, WA (US); Flagship Pioneering Innovations V, Inc., Cambridge, MA (US)

(72) Inventors: Kyle Marvin TRUDEAU, Seattle, WA (US); Christopher BANDORO, Seattle, WA (US); Lauren Pepper MACKENZIE, Seattle, WA (US); Jagesh Vijaykumar SHAH, Seattle, WA (US); Geoffrey A. VON MALTZAHN, Somerville, MA (US); Jacob Rosenblum RUBENS, Cambridge, MA (US); Michael Travis MEE, Montreal (CA)

(73) Assignees: Sana Biotechnology, Inc., Seattle, WA (US); Flagship Pioneering Innovations V, Inc., Cambridge, MA (US)

(21) Appl. No.: 17/218,025

(22) Filed: Mar. 30, 2021

Related U.S. Application Data
(60) Provisional application No. 63/154,341, filed on Feb. 26, 2021.
(60) Provisional application No. 63/003,168, filed on Mar. 31, 2020.

(51) Int. Cl. A61K 9/127; C07K 14/005; C07K 16/28; C12N 15/86; C07K 14/725

(52) U.S. Cl. CPC A61K 9/1271; C07K 14/005; C07K 16/28; C12N 15/86; C07K 16/2803; C07K 14/7051; A61K 2039/505; C07K 16/2812; C07K 16/2815; C12N 2760/18222; C12N 2740/15043; C07K 2317/569; A61K 9/1277

(57) ABSTRACT

Provided herein are lipid particles containing a lipid bilayer enclosing a lumen or cavity, a henipavirus F protein molecule or biologically active portion thereof, and a targeted envelope protein containing a henipavirus envelope attachment glycoprotein G (G protein) or biologically active portion thereof and a binding domain, such as a single domain antibody (sdAb) variable domain. Also provided herein are targeted envelope proteins containing a G protein fused or linked to a binding domain, such as a sdAb variable domain, and polynucleotides encoding such proteins. Also provided are producer cells and compositions containing such targeted lipid particles and methods of making and using the targeted lipid particles.

### CROSS-REFERENCE TO RELATED APPLICATIONS

[0001] This application claims priority to U.S. provisional application 63/003,168 entitled “Targeted Lipid Particles and compositions and Uses Thereof”, filed Mar. 31, 2020, and to U.S. provisional application 63/154,341, entitled “Targeted Lipid Particles and compositions and Uses Thereof”, filed Feb. 26, 2021, the contents of each of which are incorporated by reference in their entirety for all purposes.

### INCORPORATION BY REFERENCE OF SEQUENCE LISTING

[0002] The present application is being filed along with a Sequence Listing in electronic format. The Sequence Listing is provided as a file entitled 186152003600SubSeqList.TXT, created Jun. 19, 2021, which is 2,076,399 bytes in size. The information in the electronic format of the Sequence Listing is incorporated by reference in its entirety

### FIELD

[0003] The present disclosure relates to lipid particles containing a lipid bilayer enclosing a lumen or cavity, a henipavirus F protein molecule or biologically active portion thereof, and a targeted envelope protein containing a henipavirus envelope attachment glycoprotein G (G protein) or biologically active portion thereof and a binding domain, such as a single domain antibody (sdAb) variable domain. The present disclosure also provides a targeted envelope protein containing a G protein fused or linked to a binding domain, such as a sdAb variable domain, and polynucleotides encoding such proteins. Also disclosed are producer cells and compositions containing such targeted lipid particles and methods of making and using the targeted lipid particles.

### BACKGROUND

[0004] Lipid particles, including virus-like particles and viral vectors, are commonly used for delivery of exogenous agents to cells. However, delivery of the lipid particles to certain target cells can be challenging. For lentivral vectors, the host range can be altered by pseudotyping with a heterologous envelope protein. Certain retargeted envelope proteins may not be sufficiently stable or expressed on the surface of the lipid particle. Improved lipid particles, including virus-like particles and viral vectors, for targeting desired cells are needed. The provided disclosure addresses this need.

### SUMMARY

[0005] Provided herein is a targeted lipid particle which includes (a) a lipid bilayer enclosing a lumen, (b) a henipavirus F protein molecule or biologically active portion thereof; and (c) a targeted envelope protein comprising (i) a henipavirus envelope attachment glycoprotein G (G protein) or a biologically active portion thereof and (ii) single domain antibody (sdAb) variable domain, wherein the sdAb variable domain is attached to the C-terminus of the G protein or the biologically active portion thereof, wherein the F protein molecule or the biologically active portion thereof and the targeted envelope protein are embedded in the lipid bilayer. In some embodiments, the the single domain antibody is attached to the G protein via a linker. In some embodiments, the linker is a peptide linker.

[0006] Provided herein is a targeted lipid particle which includes (a) a lipid bilayer enclosing a lumen, (b) a henipavirus F protein molecule or biologically active portion thereof; and (c) a targeted envelope protein comprising a henipavirus envelope attachment glycoprotein G (G protein) or biologically active portion thereof attached to a single domain antibody (sdAb) variable domain via a peptide linker, wherein the single domain antibody binds to a cell surface molecule of a target cell, wherein the F protein molecule or biologically active portion thereof and the targeted envelope protein are embedded in the lipid bilayer. In some embodiments, N-terminus of the F protein molecule or biologically active portion thereof is exposed on the outside of lipid bilayer. In some embodiments, the C-terminus of the G protein is exposed on the outside of the lipid bilayer.

[0007] In some embodiments, the single domain antibody binds a cell surface molecule present on a target cell. In some embodiments, the cell surface molecule is a protein, glycan, lipid or low molecular weight molecule. In some of any embodiments, the single domain antibody binds an antigen or portion thereof present on a target cell. In some embodiments, the antigen is the cell surface molecule or a portion of the cell surface molecule that contains an epitope recognized by the single domain antibody. In some of any embodiments, the target cell is selected from the group consisting of tumor-infiltrating lymphocytes, T cells, neoplastic or tumor cells, virus-infected cells, stem cells, central nervous system (CNS) cells, hematopoeietic stem cells (HSCs), liver cells or fully differentiated cells. In some embodiments, the target cell is selected from the group consisting of a CD3+ T cell, a CD4+ Tcell, a CD8+ T cell, a hepatocyte, a haematepoietic stem cell, a CD34+ haematepoietic stem cell, a CD105+ haematepoietic stem cell, a CD117+ haematepoietic stem cell, a CD105+ endothelial cell, a B cell, a CD20+ B cell, a CD19+ B cell, a cancer cell, a CD133+ cancer cell, an EpCAM+ cancer cell, a CD19+ cancer cell, a Her2/Neu+ cancer cell, a GluA2+ neuron, a GluA4+ neuron, a NKG2D+ natural killer cell, a SLC1A3+ astrocyte, a SLC7A10+ adipocyte, or a CD30+ lung epithelial cell. In some of any embodiments, the target cell is a hepatocyte. In some of any embodiments, the cell surface molecule or antigen is selected from the group consisting of ASGR1, ASGR2 and TM4SF5.

[0008] In some of any embodiments, the target cell is a T cell. In some of any embodiments, the cell surface molecule or antigen is CD8 or CD4.

[0009] In some of any embodiments, the cell surface molecule or antigen is LDL-R.

[0010] Provided herein are targeted lipid particles comprising (a) a lipid bilayer enclosing a lumen, (b) a henipavirus F protein molecule or biologically active portion thereof; and (c) a targeted envelope protein comprising (i) a henipavirus envelope attachment glycoprotein G (G protein) or a biologically active portion thereof and (ii) a binding domain, wherein the binding domain is attached to the C-terminus of the G protein or the biologically active portion thereof, and wherein the binding domain binds a cell surface molecule selected from the group consisting of ASGR1, ASGR2, and TM4SF5, optionally human ASGR1, human ASGR2 and human ASGR2,

wherein the F protein molecule or the biologically active portion thereof and the targeted envelope protein are embedded in the lipid bilayer.

[0011] Provided herein are targeted lipid particles comprising (a) a lipid bilayer enclosing a lumen, (b) a henipavirus F protein molecule or biologically active portion thereof; and (c) a targeted envelope protein comprising (i) a henipavirus envelope attachment glycoprotein G (G protein) or a biologically active portion thereof and (ii) a binding domain, wherein the binding domain is attached to the C-terminus of the G protein or the biologically active portion thereof, and wherein the binding domain binds a cell surface molecule selected from the group consisting of CD8 and CD4, optionally human CD8 or human CD4, wherein the F protein molecule or the biologically active portion thereof and the targeted envelope protein are embedded in the lipid bilayer.

[0012] Provided herein are targeted lipid particles comprising (a) a lipid bilayer enclosing a lumen, (b) a henipavirus F protein molecule or biologically active portion thereof; and (c) a targeted envelope protein comprising (i) a henipavirus envelope attachment glycoprotein G (G protein) or a biologically active portion thereof and (ii) a binding domain, wherein the binding domain is attached to the C-terminus of the G protein or the biologically active portion thereof, and wherein the binding domain binds a cell surface molecule that is low density lipoprotein receptor (LDL-R), optionally human LDL-R, wherein the F protein molecule or the biologically active portion thereof and the targeted envelope protein are embedded in the lipid bilayer.

[0013] In some of any embodiments, the lipid particle is a lentiviral vector. In some of any embodiments, the binding domain is attached to the G protein via a linker. In some of any embodiments, the linker is a peptide linker.

[0014] Provided herein is a lentiviral vector, comprising a binding domain that targets a cell surface molecule selected from the group consisting of ASGR1, ASGR2 and TM4SF5, optionally human ASGR1, human ASGR2 and human TM4SF5, wherein the lentiviral vector is pseudotyped with a retargeted viral fusion protein, said retargeted viral fusion protein comprising: (a) a henipavirus F protein molecule or biologically active portion thereof; and (b) a targeted envelope protein comprising the binding domain attached to a henipavirus envelope attachment glycoprotein G (G protein) or a biologically active portion thereof.

[0015] Provided herein is a lentiviral vector, comprising a binding domain that targets a cell surface molecule selected from the group consisting of CD8 and CD4, optionally human CD8 and human CD4, wherein the lentiviral vector is pseudotyped with a retargeted viral fusion protein, said retargeted viral fusion protein comprising: (a) a henipavirus F protein molecule or biologically active portion thereof; and (b) a targeted envelope protein comprising the binding domain attached to a henipavirus envelope attachment glycoprotein G (G protein) or a biologically active portion thereof.

[0016] Provided herein is a lentiviral vector, comprising a binding domain that targets low density lipoprotein receptor (LDL-R), optionally wherein the LDL-R is human LDL-R, wherein the lentiviral vector is pseudotyped with a retargeted viral fusion protein comprising (a) a henipavirus F protein molecule or biologically active portion thereof; and (b) a targeted envelope protein comprising the binding domain attached to a henipavirus envelope attachment glycoprotein G (G protein) or a biologically active portion thereof.

[0017] In some of any embodiments, the binding domain is attached to the C-terminus of the G protein or the biologically active portion thereof.

[0018] Provided herein is a lentiviral vector, comprising (a) a henipavirus F protein molecule or biologically active portion thereof; and (b) a targeted envelope protein comprising (i) a henipavirus envelope attachment glycoprotein G (G protein) or a biologically active portion thereof and (ii) a binding domain, wherein the binding domain is attached to the C-terminus of the G protein or the biologically active portion thereof, and wherein the binding domain binds CD4; and (c) a cargo comprising nucleic acid encoding a chimeric antigen receptor (CAR), wherein the CAR comprises (i) an extracellular antigen binding domain that binds an extracellular antigen (e.g., CD19 or BCMA) and (ii) an intracellular signaling region a CD3zeta signaling domain and, optionally a 4-1BB or CD28 co-stimulatory signaling domain. In some embodiments, the extracellular antigen binding domain of the CAR is an scFv.

[0019] In some of any embodiments, the lentiviral vector is capable of delivering the nucleic acid encoding the CAR to T cells. In some embodiments the T cells are in vivo in a subject.

[0020] Provided herein is a lentiviral vector, comprising:(a) a henipavirus F protein molecule or biologically active portion thereof; and (b) a targeted envelope protein comprising (i) a henipavirus envelope attachment glycoprotein G (G protein) or a biologically active portion thereof and (ii) a binding domain, wherein the binding domain is attached to the C-terminus of the G protein or the biologically active portion thereof, and wherein the binding domain binds ASGR1; wherein the lentiviral vector is capable of targeting to hepatocytes. In some of any embodiments, the lentiviral vector further comprises an exogenous agent for delivery to hepatocytes.

[0021] In some of any embodiments, the lentiviral vector is capable of delivering the exogenous agent to hepatocytes, optionally wherein the hepatocytes are in vivo in a subject.

[0022] In some of any embodiments, the binding domain is attached to the G protein via a linker. In some of any embodiments, the linker is a peptide linker. In some of any embodiments, the binding domain is a single domain antibody. In some of any embodiments, the binding domain is a single chain variable fragment (scFv).

[0023] In some of any embodiments, the peptide linker comprises up to 65 amino acids in length. In some of any embodiments, the peptide linker comprises up to 50 amino acids in length. In some of any embodiments, the peptide linker comprises from or from about 2 to 65 amino acids, 2 to 60 amino acids, 2 to 56 amino acids, 2 to 52 amino acids, 2 to 48 amino acids, 2 to 44 amino acids, 2 to 40 amino acids, 2 to 36 amino acids, 2 to 32 amino acids, 2 to 28 amino acids, 2 to 24 amino acids, 2 to 20 amino acids, 2 to 18 amino acids, 2 to 14 amino acids, 2 to 12 amino acids, 2 to 10 amino acids, 2 to 8 amino acids, 2 to 6 amino acids, 6 to 65 amino acids, 6 to 60 amino acids, 6 to 56 amino acids, 6 to 52 amino acids, 6 to 48 amino acids, 6 to 44 amino acids, 6 to 40 amino acids, 6 to 36 amino acids, 6 to 32 amino acids, 6 to 28 amino acids, 6 to 24 amino acids, 6 to 20 amino acids, 6 to 18 amino acids, 6 to 14 amino acids, 6 to 12 amino acids, 6 to 10 amino acids, 6 to 8 amino acids, 8 to 65 amino acids, 8 to 60 amino acids, 8 to 56 amino acids, 8 to 52 amino acids, 8 to 48 amino acids, 8 to 44 amino acids, 8 to 40 amino acids, 8 to 36 amino acids, 8 to 32 amino acids, 8 to 28 amino acids, 8 to 24 amino acids, 8 to 20 amino acids, 8 to 18 amino acids, 8 to 14 amino acids, 8 to 12 amino acids, 8 to 10 amino acids, 10 to 65 amino acids, 10 to 60 amino acids, 10 to 56 amino acids, 10 to 52 amino acids, 10 to 48 amino acids, 10 to 44 amino acids, 10 to 40 amino acids, 10 to 36 amino acids, 10 to 32 amino acids, 10 to 28 amino acids, 10 to 24 amino acids, 10 to 20 amino acids, 10 to 18 amino acids, 10 to 14 amino acids, 10 to 12 amino acids, 12 to 65 amino acids, 12 to 60 amino acids, 12 to 56 amino acids, 12 to 52 amino acids, 12 to 48 amino acids, 12 to 44 amino acids, 12 to 40 amino acids, 12 to 36 amino acids, 12 to 32 amino acids, 12 to 28 amino acids, 12 to 24 amino acids, 12 to 20 amino acids, 12 to 18 amino acids, 12 to 14 amino acids, 14 to 65 amino acids, 14 to 60 amino acids, 14 to 56 amino acids, 14 to 52 amino acids, 14 to 48 amino acids, 14 to 44 amino acids, 14 to 40 amino acids, 14 to 36 amino acids, 14 to 32 amino acids, 14 to 28 amino acids, 14 to 24 amino acids, 14 to 20 amino acids, 14 to 18 amino acids, 18 to 65 amino acids, 18 to 60 amino acids, 18 to 56 amino acids, 18 to 52 amino acids, 18 to 48 amino acids, 18 to 44 amino acids, 18 to 40 amino acids, 18 to 36 amino acids, 18 to 32 amino acids, 18 to 28 amino acids, 18 to 24 amino acids, 18 to 20 amino acids, 20 to 65 amino acids, 20 to 60 amino acids, 20 to 56 amino acids, 20 to 52 amino acids, 20 to 48 amino acids, 20 to 44 amino acids, 20 to 40 amino acids, 20 to 36 amino acids, 20 to 32 amino acids, 20 to 28 amino acids, 20 to 26 amino acids, 20 to 24 amino acids, 24 to 65 amino acids, 24 to 60 amino acids, 24 to 56 amino acids, 24 to 52 amino acids, 24 to 48 amino acids, 24 to 44 amino acids, 24 to 40 amino acids, 24 to 36 amino acids, 24 to 32 amino acids, 24 to 30 amino acids, 24 to 28 amino acids, 28 to 65 amino acids, 28 to 60 amino acids, 28 to 56 amino acids, 28 to 52 amino acids, 28 to 48 amino acids, 28 to 44 amino acids, 28 to 40 amino acids, 28 to 36 amino acids, 28 to 34 amino acids, 28 to 32 amino acids, 32 to 65 amino acids, 32 to 60 amino acids, 32 to 56 amino acids, 32 to 52 amino acids, 32 to 48 amino acids, 32 to 44 amino acids, 32 to 40 amino acids, 32 to 38 amino acids, 32 to 36 amino acids, 36 to 65 amino acids, 36 to 60 amino acids, 36 to 56 amino acids, 36 to 52 amino acids, 36 to 48 amino acids, 36 to 44 amino acids, 36 to 40 amino acids, 40 to 65 amino acids, 40 to 60 amino acids, 40 to 56 amino acids, 40 to 52 amino acids, 40 to 48 amino acids, 40 to 44 amino acids, 44 to 65 amino acids, 44 to 60 amino acids, 44 to 56 amino acids, 44 to 52 amino acids, 44 to 48 amino acids, 48 to 65 amino acids, 48 to 60 amino acids, 48 to 56 amino acids, 48 to 52 amino acids, 50 to 65 amino acids, 50 to 60 amino acids, 50 to 56 amino acids, 50 to 52 amino acids, 54 to 65 amino acids, 54 to 60 amino acids, 54 to 56 amino acids, 58 to 65 amino acids, 58 to 60 amino acids, or 60 to 65 amino acids. In some of any embodiments, peptide linker comprises a polypeptide that is 3, 4, 5, 6, 7, 8, 9, 10, 11, 12, 13, 14, 15, 16, 17, 18, 19, 20, 21, 22, 23, 24, 25, 26, 27, 28, 29, 30, 31, 32, 33, 34, 35, 36, 37, 38, 39, 40, 41, 42, 43, 44, 45, 46, 47, 48, 49, 50, 51, 52, 53, 54, 55, 56, 57, 58, 59, 60, 61, 62, 63, 64 or 65 amino acids in length. In some of any embodiments, wherein the peptide linker is a flexible linker that comprises GS, GGS, GGGGS (SEQ ID NO:43), GGGGGS (SEQ ID NO:41) or combinations thereof. In some of any embodiments, the peptide linker comprises (GGS)n, wherein n is 1 to 10. In some of any embodiments, the peptide linker comprises (GGGGS)n (SEQ ID NO: 42), wherein n is 1 to 10. In some of any embodiments, the peptide linker comprises (GGGGGS)n (SEQ ID NO:27), wherein n is 1 to 6.

[0024] In some of any embodiments, the G protein or the biologically active portion thereof is a wild-type Nipah virus G (NiV-G) protein or a Hendra virus G protein. In some of any embodiments, the G protein or the biologically active portion thereof is a wild-type NiV-G protein or a functionally active variant or biologically active portion thereof. In some of any embodiments, the mutant NiV-G protein or functionally active variant or biologically active portion thereof comprises an amino acid sequence having at least at or about 80%, at least at or about 81%, at least at or about 82%, at least at or about 83%, at least at or about 84%, at least at or about 85%, at least at or about 86%, at least at or about 87%, at least at or about 88%, at least at or about 89%, at least at or about 90%, at least at or about 91%, at least at or about 92%, at least at or about 93%, at least at or about 94%, at least at or about 95%, at or about 96%, at least at or about 97%, at least at or about 98%, or at least at or about 99% sequence identity to SEQ ID NO:9, SEQ ID NO:28 or SEQ ID NO:44.

[0025] In some of any embodiments, the NiV-G protein is a biologically active portion that is truncated and lacks up to 40 contiguous amino acid residues at or near the N-terminus of the wild-type NiV-G protein (SEQ ID NO:9, SEQ ID NO:28 or SEQ ID NO:44).

[0026] In some of any embodiments, the NiV-G protein is a biologically active portion that is truncated at the N-terminus of wild-type NiV-G and has the sequence set forth in any of SEQ ID NOS: 10-15, 35-40 or 45-50 or an amino acid sequence having at least at or about 80%, at least at or about 81%, at least at or about 82%, at least at or about 83%, at least at or about 84%, at least at or about 85%, at least at or about 86%, at least at or about 87%, at least at or about 88%, at least at or about 89%, at least at or about 90%, at least at or about 91%, at least at or about 92%, at least at or about 93%, at least at or about 94%, at least at or about 95%, at or about 96%, at least at or about 97%, at least at or about 98%, or at least at or about 99% sequence identity to SEQ ID NOs: 10-15, 35-40 or 45-50.

[0027] In some of any embodiments, the NiV-G protein is a biologically active portion that has a 5 amino acid truncation at or near the N-terminus of the wild-type NiV-G protein (SEQ ID NO:9, SEQ ID NO:28 or SEQ ID NO:44). In some of any embodiments, the NiV-G protein or the biologically active portion has the amino acid sequence set forth in SEQ ID NO: 10 or an amino acid sequence having at least at or about 80%, at least at or about 81%, at least at or about 82%, at least at or about 83%, at or about 84%, at least at or about 85%, at least at or about 86%, or at least at or about 87%, at least at or about 88%, or at least at or about 89%, at least at or about 90%, at least at or about 91%, at least at or about 92%, at least at or about 93%, at least at or about 94%, at least at or about 95%, at or about 96%, at least at or about 97%, at least at or about 98%, or at least at or about 99% sequence identity to SEQ ID NO:10. In some of any embodiments, the NiV-G protein or the biologically active portion has the amino acid sequence set forth in SEQ ID NO: 35 or an amino acid sequence having at least at or about 80%, at least at or about 81%, at least at or about 82%, at least at or about 83%, at or about 84%, at least at or about 85%, at least at or about 86%, or at least at or about 87%, at least at or about 88%, or at least at or about 89%, at least at or about 90%, at least at or about 91%, at least at or about 92%, at least at or about 93%, at least at or about 94%, at least at or about 95%, at or about 96%, at least at or about 97%, at least at or about 98%, or at least at or about 99% sequence identity to SEQ ID NO:35. In some of any embodiments, the NiV-G protein or the biologically active portion has the amino acid sequence set forth in SEQ ID NO: 45 or an amino acid sequence having at least at or about 80%, at least at or about 81%, at least at or about 82%, at least at or about 83%, at or about 84%, at least at or about 85%, at least at or about 86%, or at least at or about 87%, at least at or about 88%, or at least at or about 89%, at least at or about 90%, at least at or about 91%, at least at or about 92%, at least at or about 93%, at least at or about 94%, at least at or about 95%, at or about 96%, at least at or about 97%, at least at or about 98%, or at least at or about 99% sequence identity to SEQ ID NO:45.

[0028] In some of any embodiments, the NiV-G protein is a biologically active portion that has a 10 amino acid truncation at or near the N-terminus of the wild-type NiV-G protein (SEQ ID NO:9, SEQ ID NO:28 or SEQ ID NO:44). In some of any embodiments, the NiV-G protein or the biologically active portion has the amino acid sequence set forth in SEQ ID NO: 36 or an amino acid sequence having at least at or about 80%, at least at or about 81%, at least at or about 82%, at least at or about 83%, at or about 84%, at least at or about 85%, at least at or about 86%, or at least at or about 87%, at least at or about 88%, or at least at or about 89%, at least at or about 90%, at least at or about 91%, at least at or about 92%, at least at or about 93%, at least at or about 94%, at least at or about 95%, at or about 96%, at least at or about 97%, at least at or about 98%, or at least at or about 99% sequence identity to SEQ ID NO:36. In some of any embodiments, the NiV-G protein or the biologically active portion has the amino acid sequence set forth in SEQ ID NO: 11 or an amino acid sequence having at least at or about 80%, at least at or about 81%, at least at or about 82%, at least at or about 83%, at or about 84%, at least at or about 85%, at least at or about 86%, or at least at or about 87%, at least at or about 88%, or at least at or about 89%, at least at or about 90%, at least at or about 91%, at least at or about 92%, at least at or about 93%, at least at or about 94%, at least at or about 95%, at or about 96%, at least at or about 97%, at least at or about 98%, or at least at or about 99% sequence identity to SEQ ID NO:11. In some of any embodiments, the NiV-G protein or the biologically active portion has the amino acid sequence set forth in SEQ ID NO: 46 or an amino acid sequence having at least at or about 80%, at least at or about 81%, at least at or about 82%, at least at or about 83%, at or about 84%, at least at or about 85%, at least at or about 86%, or at least at or about 87%, at least at or about 88%, or at least at or about 89%, at least at or about 90%, at least at or about 91%, at least at or about 92%, at least at or about 93%, at least at or about 94%, at least at or about 95%, at or about 96%, at least at or about 97%, at least at or about 98%, or at least at or about 99% sequence identity to SEQ ID NO:46.

[0029] In some of any embodiments, the NiV-G protein or the biologically active portion has a 15 amino acid truncation at or near the N-terminus of the wild-type NiV-G protein (SEQ ID NO:9, SEQ ID NO:28 or SEQ ID NO:44). In some of any embodiments, the NiV-G protein or the biologically active portion has the amino acid sequence set forth in SEQ ID NO: 12 or an amino acid sequence having at least at or about 80%, at least at or about 81%, at least at or about 82%, at least at or about 83%, at or about 84%, at least at or about 85%, at least at or about 86%, or at least at or about 87%, at least at or about 88%, or at least at or about 89%, at least at or about 90%, at least at or about 91%, at least at or about 92%, at least at or about 93%, at least at or about 94%, at least at or about 95%, at or about 96%, at least at or about 97%, at least at or about 98%, or at least at or about 99% sequence identity to SEQ ID NO:12. In some of any embodiments, the NiV-G protein or the biologically active portion has the amino acid sequence set forth in SEQ ID NO: 37 or an amino acid sequence having at least at or about 80%, at least at or about 81%, at least at or about 82%, at least at or about 83%, at or about 84%, at least at or about 85%, at least at or about 86%, or at least at or about 87%, at least at or about 88%, or at least at or about 89%, at least at or about 90%, at least at or about 91%, at least at or about 92%, at least at or about 93%, at least at or about 94%, at least at or about 95%, at or about 96%, at least at or about 97%, at least at or about 98%, or at least at or about 99% sequence identity to SEQ ID NO:37. In some of any embodiments, the NiV-G protein or the biologically active portion has the amino acid sequence set forth in SEQ ID NO: 47 or an amino acid sequence having at least at or about 80%, at least at or about 81%, at least at or about 82%, at least at or about 83%, at or about 84%, at least at or about 85%, at least at or about 86%, or at least at or about 87%, at least at or about 88%, or at least at or about 89%, at least at or about 90%, at least at or about 91%, at least at or about 92%, at least at or about 93%, at least at or about 94%, at least at or about 95%, at or about 96%, at least at or about 97%, at least at or about 98%, or at least at or about 99% sequence identity to SEQ ID NO:47.

[0030] In some of any embodiments, the NiV-G protein is a biologically active portion that has a 20 amino acid truncation at or near the N-terminus of the wild-type NiV-G protein (SEQ ID NO:9, SEQ ID NO:28 or SEQ ID NO:44). In some of any embodiments, the NiV-G protein or the biologically active portion has the amino acid sequence set forth in SEQ ID NO: 13 or an amino acid sequence having at least at or about 80%, at least at or about 81%, at least at or about 82%, at least at or about 83%, at or about 84%, at least at or about 85%, at least at or about 86%, or at least at or about 87%, at least at or about 88%, or at least at or about 89%, at least at or about 90%, at least at or about 91%, at least at or about 92%, at least at or about 93%, at least at or about 94%, at least at or about 95%, at or about 96%, at least at or about 97%, at least at or about 98%, or at least at or about 99% sequence identity to SEQ ID NO:13. In some of any embodiments, the NiV-G protein or the biologically active portion has the amino acid sequence set forth in SEQ ID NO: 38 or an amino acid sequence having at least at or about 80%, at least at or about 81%, at least at or about 82%, at least at or about 83%, at or about 84%, at least at or about 85%, at least at or about 86%, or at least at or about 87%, at least at or about 88%, or at least at or about 89%, at least at or about 90%, at least at or about 91%, at least at or about 92%, at least at or about 93%, at least at or about 94%, at least at or about 95%, at or about 96%, at least at or about 97%, at least at or about 98%, or at least at or about 99% sequence identity to SEQ ID NO:38. In some of any embodiments, the NiV-G protein or the biologically active portion has the amino acid sequence set forth in SEQ ID NO: 48 or an amino acid sequence having at least at or about 80%, at least at or about 81%, at least at or about 82%, at least at or about 83%, at or about 84%, at least at or about 85%, at least at or about 86%, or at least at or about 87%, at least at or about 88%, or at least at or about 89%, at least at or about 90%, at least at or about 91%, at least at or about 92%, at least at or about 93%, at least at or about 94%, at least at or about 95%, at or about 96%, at least at or about 97%, at least at or about 98%, or at least at or about 99% sequence identity to SEQ ID NO:48.

[0031] In some of any embodiments, the NiV-G protein is a biologically active portion has a 25 amino acid truncation at or near the N-terminus of the wild-type NiV-G protein (SEQ ID NO:9, SEQ ID NO:28 or SEQ ID NO:44). In some of any embodiments, the NiV-G protein has the amino acid sequence set forth in SEQ ID NO: 14 or an amino acid sequence having at least at or about 80%, at least at or about 81%, at least at or about 82%, at least at or about 83%, at or about 84%, at least at or about 85%, at least at or about 86%, or at least at or about 87%, at least at or about 88%, or at least at or about 89%, at least at or about 90%, at least at or about 91%, at least at or about 92%, at least at or about 93%, at least at or about 94%, at least at or about 95%, at or about 96%, at least at or about 97%, at least at or about 98%, or at least at or about 99% sequence identity to SEQ ID NO:14. In some of any embodiments, the NiV-G protein or the biologically active portion has the amino acid sequence set forth in SEQ ID NO: 39 or an amino acid sequence having at least at or about 80%, at least at or about 81%, at least at or about 82%, at least at or about 83%, at or about 84%, at least at or about 85%, at least at or about 86%, or at least at or about 87%, at least at or about 88%, or at least at or about 89%, at least at or about 90%, at least at or about 91%, at least at or about 92%, at least at or about 93%, at least at or about 94%, at least at or about 95%, at or about 96%, at least at or about 97%, at least at or about 98%, or at least at or about 99% sequence identity to SEQ ID NO:39. In some of any embodiments, the NiV-G protein or the biologically active portion has the amino acid sequence set forth in SEQ ID NO: 49 or an amino acid sequence having at least at or about 80%, at least at or about 81%, at least at or about 82%, at least at or about 83%, at or about 84%, at least at or about 85%, at least at or about 86%, or at least at or about 87%, at least at or about 88%, or at least at or about 89%, at least at or about 90%, at least at or about 91%, at least at or about 92%, at least at or about 93%, at least at or about 94%, at least at or about 95%, at or about 96%, at least at or about 97%, at least at or about 98%, or at least at or about 99% sequence identity to SEQ ID NO:49.

[0032] In some of any embodiments, the NiV-G protein is a biologically active portion has a 30 amino acid truncation at or near the N-terminus of the wild-type NiV-G protein (SEQ ID NO:9, SEQ ID NO:28 or SEQ ID NO:44). In some of any embodiments, the NiV-G protein or the biologically active portion has the amino acid sequence set forth in SEQ ID NO: 15 or an amino acid sequence having at least at or about 80%, at least at or about 81%, at least at or about 82%, at least at or about 83%, at or about 84%, at least at or about 85%, at least at or about 86%, or at least at or about 87%, at least at or about 88%, or at least at or about 89%, at least at or about 90%, at least at or about 91%, at least at or about 92%, at least at or about 93%, at least at or about 94%, at least at or about 95%, at or about 96%, at least at or about 97%, at least at or about 98%, or at least at or about 99% sequence identity to SEQ ID NO:15. In some of any embodiments, the NiV-G protein or the biologically active portion has the amino acid sequence set forth in SEQ ID NO: 40 or an amino acid sequence having at least at or about 80%, at least at or about 81%, at least at or about 82%, at least at or about 83%, at or about 84%, at least at or about 85%, at least at or about 86%, or at least at or about 87%, at least at or about 88%, or at least at or about 89%, at least at or about 90%, at least at or about 91%, at least at or about 92%, at least at or about 93%, at least at or about 94%, at least at or about 95%, at or about 96%, at least at or about 97%, at least at or about 98%, or at least at or about 99% sequence identity to SEQ ID NO:40.

[0033] In some of any embodiments, the NiV-G protein is a biologically active portion that has a 34 amino acid truncation at or near the N-terminus of the wild-type NiV-G protein (SEQ ID NO:9, SEQ ID NO:28 or SEQ ID NO:44). In some of any embodiments, the NiV-G protein or the biologically active portion has the amino acid sequence set forth in SEQ ID NO: 22 or an amino acid sequence having at least at or about 80%, at least at or about 81%, at least at or about 82%, at least at or about 83%, at least at or about 84%, at least at or about 85%, at least at or about 86%, at least at or about 87%, at least at or about 88%, at least at or about 89%, at or about 90%, at least at or about 91%, at least at or about 92%, at least at or about 93%, at least at or about 94%, at least at or about 95%, at or about 96%, at least at or about 97%, at least at or about 98%, or at least at or about 99% sequence identity to SEQ ID NO:22. In some of any embodiments, the NiV-G protein or the biologically active portion has the amino acid sequence set forth in SEQ ID NO: 53 or an amino acid sequence having at least at or about 80%, at least at or about 81%, at least at or about 82%, at least at or about 83%, at least at or about 84%, at least at or about 85%, at least at or about 86%, at least at or about 87%, at least at or about 88%, at least at or about 89%, at or about 90%, at least at or about 91%, at least at or about 92%, at least at or about 93%, at least at or about 94%, at least at or about 95%, at or about 96%, at least at or about 97%, at least at or about 98%, or at least at or about 99% sequence identity to SEQ ID NO:53.

[0034] In some of any embodiments, the G-protein, the biologically active portion thereof is a functionally active variant that is a mutant NiV-G protein that exhibits reduced binding to Ephrin B2 or Ephrin B3.

[0035] In some of any embodiments, the mutant NiV-G protein includes one or more amino acid substitutions corresponding to amino acid substitutions selected from the group consisting of E501A, W504A, Q530A and E533A with reference to numbering set forth in SEQ ID NO:28. In some of any embodiments, the mutant NiV-G protein includes the amino acid substitutions E501A, W504A, Q530A and E533A with reference to numbering set forth in SEQ ID NO:28.

[0036] In some of any embodiments, the mutant NiV-G protein or the biologically active portion has the amino acid sequence set forth in SEQ ID NO: 16 or an amino acid sequence having at least at or about 80%, at least at or about 81%, at least at or about 82%, at least at or about 83%, at least at or about 84%, at least at or about 85%, at least at or about 86%, at least at or about 87%, at least at or about 88%, at least at or about 89%, at least at or about 90%, at least at or about 91%, at least at or about 92%, at least at or about 93%, at least at or about 94%, at least at or about 95%, at or about 96%, at least at or about 97%, at least at or about 98%, or at least at or about 99% sequence identity to SEQ ID NO:16. In some of any embodiments, the mutant NiV-G protein or the biologically active portion has the amino acid sequence set forth in SEQ ID NO: 51 or an amino acid sequence having at least at or about 80%, at least at or about 81%, at least at or about 82%, at least at or about 83%, at least at or about 84%, at least at or about 85%, at least at or about 86%, at least at or about 87%, at least at or about 88%, at least at or about 89%, at least at or about 90%, at least at or about 91%, at least at or about 92%, at least at or about 93%, at least at or about 94%, at least at or about 95%, at or about 96%, at least at or about 97%, at least at or about 98%, or at least at or about 99% sequence identity to SEQ ID NO:51.

[0037] In some of any embodiments, the F protein or the biologically active portion thereof is a wild-type Nipah virus F (NiV-F) protein or a Hendra virus F protein or is a functionally active variant or biologically active portion thereof. In some of any embodiments, the F protein or the biologically active portion thereof is a wild-type NiV-F protein or a functionally active variant or a biologically active portion thereof. In some of any embodiments, the NiV-F-protein or the functionally active variant or biologically active portion thereof comprises the amino acid sequence set forth in SEQ ID NO: 2, or an amino acid sequence having at least at or about 80%, at least at or about 81%, at least at or about 82%, at least at or about 83%, at least at or about 84%, at least at or about 85%, at least at or about 86%, at least at or about 87%, at least at or about 88%, at least at or about 89%, at least at or about 90%, at least at or about 91%, at least at or about 92%, at least at or about 93%, at least at or about 94%, at least at or about 95%, at or about 96%, at least at or about 97%, at least at or about 98%, or at least at or about 99% sequence identity to SEQ ID NO: 2.

[0038] In some of any embodiments, the NiV-F protein is a biologically active portion thereof that has a 20 amino acid truncation at or near the C-terminus of the wild-type NiV-F protein (SEQ ID NO:2).

[0039] In some of any embodiments, the NiV-F protein or the biologically active portion has the sequence set forth in SEQ ID NO:5 or an amino acid sequence having at least at or about 80%, at least at or about 81%, at least at or about 82%, at least at or about 83%, at least at or about 84%, at least at or about 85%, at least at or about 86%, at least at or about 87%, at least at or about 88%, at least at or about 89%, at least at or about 90%, at least at or about 91%, at least at or about 92%, at least at or about 93%, at least at or about 94%, at least at or about 95%, at or about 96%, at least at or about 97%, at least at or about 98%, or at least at or about 99% sequence identity to SEQ ID NO: 5.

[0040] In some of any embodiments, the NiV-F protein is a biologically active portion thereof that includes i) a 20 amino acid truncation at or near the C-terminus of the wild-type NiV-F protein (SEQ ID NO:2); and ii) a point mutation on an N-linked glycosylation site.

[0041] In some of any embodiments, the NiV-F protein or the biologically active portion has the sequence set forth in SEQ ID NO:7 or an amino acid sequence having at least at or about 80%, at least at or about 81%, at least at or about 82%, at least at or about 83%, at least at or about 84%, at least at or about 85%, at least at or about 86%, at least at or about 87%, at least at or about 88%, at least at or about 89%, at least at or about 90%, at least at or about 91%, at least at or about 92%, at least at or about 93%, at least at or about 94%, at least at or about 95%, at or about 96%, at least at or about 97%, at least at or about 98%, or at least at or about 99% sequence identity to SEQ ID NO: 7.

[0042] In some of any embodiments, the NiV-F protein is a biologically active portion thereof that has a 22 amino acid truncation at or near the C-terminus of the wild-type NiV-F protein (SEQ ID NO:2).

[0043] In some of any embodiments, NiV-F protein or the biologically active portion has the sequence set forth in SEQ ID NO:8 or an amino acid sequence that is encoded by a sequence of nucleotides encoding a sequence having at least at or about 80%, at least at or about 81%, at least at or about 82%, at least at or about 83%, at least at or about 84%, at least at or about 85%, at least at or about 86%, at least at or about 87%, at least at or about 88%, at least at or about 89%, at least at or about 90%, at least at or about 91%, at least at or about 92%, at least at or about 93%, at least at or about 94%, at least at or about 95%, at or about 96%, at least at or about 97%, at least at or about 98%, or at least at or about 99% sequence identity to SEQ ID NO: 8.

[0044] In some of any embodiments, the NiV-F protein or the biologically active portion has the sequence set forth in SEQ ID NO:23 or an amino acid sequence having at least at or about 80%, at least at or about 81%, at least at or about 82%, at least at or about 83%, at least at or about 84%, at least at or about 85%, at least at or about 86%, at least at or about 87%, at least at or about 88%, at least at or about 89%, at least at or about 90%, at least at or about 91%, at least at or about 92%, at least at or about 93%, at least at or about 94%, at least at or about 95%, at or about 96%, at least at or about 97%, at least at or about 98%, or at least at or about 99% sequence identity to SEQ ID NO: 23. In some of any embodiments, the F-protein or the biologically active portion thereof comprises an F1 subunit or a fusogenic portion thereof.

[0045] In some of any embodiments, the F protein comprises the sequence set forth in SEQ ID NO:23 and the G protein comprises the sequence set forth in SEQ ID NO:16.

[0046] In some of any embodiments, the F protein consists or consists essentially of the sequence set forth in SEQ ID NO:23 and/or the G protein consists or consists essentially of the sequence set forth in SEQ ID NO:16.

[0047] In some of any embodiments, the F1 subunit is a proteolytically cleaved portion of the F0 precursor. In some of any embodiments, the F1 subunit comprises the sequence set forth in SEQ ID NO: 4, or an amino acid sequence having at least at or about 80%, at least at or about 81%, at least at or about 82%, at least at or about 83%, at least at or about 84%, at least at or about 85%, at least at or about 86%, at least at or about 87%, at least at or about 88%, at least at or about 89%, at least at or about 90%, at least at or about 91%, at least at or about 92%, at least at or about 93%, at least at or about 94%, at least at or about 95%, at or about 96%, at least at or about 97%, at least at or about 98%, or at least at or about 99% sequence identity to SEQ ID NO:4.

[0048] In some of any embodiments, the lipid bilayer is derived from a membrane of a host cell used for producing a retrovirus or retrovirus-like particle. In some of any embodiments, the host cell is selected from the group consisting of CHO cells, BHK cells, MDCK cells, C3H 10T1/2 cells, FLY cells, Psi-2 cells, BOSC 23 cells, PA317 cells, WEHI cells, COS cells, BSC 1 cells, BSC 40 cells, BMT 10 cells, VERO cells, W138 cells, MRCS cells, A549 cells, HT1080 cells, 293 cells, 293T cells, B-50 cells, 3T3 cells, NIH3T3 cells, HepG2 cells, Saos-2 cells, Huh7 cells, HeLa cells, W163 cells, 211 cells, and 211A cells. In some of any embodiments, the host cell comprises 293T cells. In some of any embodiments, the lipid bilayer is or comprises a viral envelope. In some of any embodiments, the retrovirus-like particle is replication defective.

[0049] In some of any embodiments, the targeted lipid particle comprises one or more viral components other than the F protein molecule and the G protein. In some of any embodiments, the one or more viral components are from a retrovirus. In some of any embodiments, the retrovirus is a lentivirus. In some of any embodiments, the one or more viral components comprise a viral packaging protein selected from one or more of Gag, Pol, Rev and Tat. In some of any embodiments, the one or more viral components comprises one or more of (e.g., all of) the following nucleic acid sequences: 5′ LTR (e.g., comprising U5 and lacking a functional U3 domain), Psi packaging element (Psi), Central polypurine tract (cPPT)/central termination sequence (CTS) (e.g. DNA flap), Poly A tail sequence, a posttranscriptional regulatory element (e.g. WPRE), a Rev response element (RRE), and 3′ LTR (e.g., comprising U5 and lacking a functional U3).

[0050] In some of any embodiments, the targeted lipid particle is a lentiviral vector.

[0051] In some of any embodiments, the targeted lipid particle or the lentiviral vector is replication defective.

[0052] In some of any embodiments, the targeted lipid particle or the lentiviral vector further comprises an exogenous agent. In some of any embodiments, the targeted lipid particle further comprises an exogenous agent. In some embodiments, the lentiviral vector further comprises an exogenous agent.

[0053] In some of any embodiments, the exogenous agent is present in the lumen. In some of any embodiments, the exogenous agent is a protein or a nucleic acid. In some embodiments, the nucleic acid is a DNA or RNA.

[0054] In some of any embodiments, the exogenous agent is a nucleic acid encoding a cargo for delivery to the target cell. In some of any embodiments, the exogenous agent encodes a therapeutic agent or a diagnostic agent.

[0055] In some of any embodiments, the exogenous agent encodes a membrane protein. In some embodiments, the membrane protein is an antigen receptor for targeting cells expressed by or associated with a disease or condition. In some embodiments, the membrane protein is a chimeric antigen receptor (CAR). In some embodiments, the CAR comprises (i) an extracellular antigen binding domain that binds an extracellular antigen (e.g., CD19 or BCMA), optionally wherein the extracellular antigen binding domain is an scFv, (ii) a transmembrane domain and (iii) an intracellular signaling region comprising a CD3zeta signaling domain and, optionally a co-stimulatory signaling domain, e.g., a 4-1BB or CD28 co-stimulatory signaling domain. In some embodiments, the target cell is a T cell. In some embodiments, the cell surface molecule on the target cell is CD4 or CD8. In some embodiments, the binding domain is an scFv that binds CD4 (e.g. human CD4). In some embodiments, the binding domain is a single domain antibody that binds CD4 (e.g. human CD4). In some embodiments, the binding domain is an scFv that binds CD8 (e.g. human CD8). In some embodiments, the binding domain is a single domain antibody that binds CD8 (e.g. human CD8).

[0056] In some of any embodiments, the exogenous agent is a nucleic acid comprising a payload gene for correcting a genetic deficiency, optionally a genetic deficiency in the target cell. In some embodiments, the genetic deficiency is associated with a liver cell or a hepatocyte. In some embodiments, the target cell is a hepatocyte. In some embodiments, the cell surface molecule is a molecule selected from the group consisting of ASGR1, ASGR2 and TM4SF5. In some embodiments, the binding domain is an scFv that binds ASGR1 (e.g. human ASGR1). In some embodiments, the binding domain is a single domain antibody that binds ASGR1 (e.g. human ASGR1). In some embodiments, the binding domain is an scFv that binds ASGR2 (e.g. human ASGR2). In some embodiments, the binding domain is a single domain antibody that binds ASGR2 (e.g. human ASGR2). In some embodiment, the binding domain is a scFv that binds TM4SF5 (e.g. human TM4SF5). In some embodiments, the binding domain is a single domain antibody that binds TM4SF5 (e.g. human TM4SF5).

[0057] In some of any embodiments, the single domain antibody binds a cell surface molecule present on a target cell. In some of any embodiments, the cell surface molecule is a protein, glycan, lipid or low molecular weight molecule. In some of any embodiments, the target cell is selected from the group consisting of tumor-infiltrating lymphocytes, T cells, neoplastic or tumor cells, virus-infected cells, stem cells, central nervous system (CNS) cells, hematopoeietic stem cells (HSCs), liver cells or fully differentiated cells. In some of any embodiments, the target cell is selected from the group consisting of a CD3+ T cell, a CD4+ Tcell, a CD8+ T cell, a hepatocyte, a haematepoietic stem cell, a CD34+ haematepoietic stem cell, a CD105+ haematepoietic stem cell, a CD117+ haematepoietic stem cell, a CD105+ endothelial cell, a B cell, a CD20+ B cell, a CD19+ B cell, a cancer cell, a CD133+ cancer cell, an EpCAM+ cancer cell, a CD19+ cancer cell, a Her2/Neu+ cancer cell, a GluA2+ neuron, a GluA4+ neuron, a NKG2D+ natural killer cell, a SLC1A3+ astrocyte, a SLC7A10+ adipocyte, or a CD30+ lung epithelial cell.

[0058] In some of any embodiments, the single domain antibody binds an antigen or portion thereof present on a target cell. In some of any embodiments, the cell surface molecule or antigen is selected from the group consisting of ASGR1, ASGR2 and TM4SF5. In some embodiments, the antigen or portion thereof is human ASGR1. In some embodiments, the antigen or portion thereof is human ASGR2. In some embodiments, the antigen or portion thereof is human TM4SF5.

[0059] Provided herein is a polynucleotide comprising a nucleic acid sequence encoding (i) a henipavirus envelope attachment glycoprotein G (G protein) or a biologically active portion thereof and (ii) a binding domain that binds a cell surface molecule selected from the group consisting of ASGR1, ASGR2, and TM4SF5. In some embodiments, the cell surface molecule is human ASGR1. In some embodiments, the cell surface molecule is human ASGR2. In some embodiments, the cell surface molecule is human TM4SF5. In some of any embodiments, the cell surface molecule or antigen is CD8 or CD4.

[0060] Provided herein is a nucleic acid sequence encoding (i) a henipavirus envelope attachment glycoprotein G (G protein) or a biologically active portion thereof and (ii) a binding domain that binds a cell surface molecule selected from the group consisting of CD4 and CD8. In some embodiments, the cell surface molecule is human CD4. In some embodiments, the cell surface molecule is human CD8. In some embodiments, the cell surface molecule or antigen is low density lipoprotein receptor (LDL-R). In some embodiments, the cell surface molecule or antigen is human LDL-R.

[0061] Provided herein is a polynucleotide comprising a nucleic acid sequence encoding (i) a henipavirus envelope attachment glycoprotein G (G protein) or a biologically active portion thereof and (ii) a binding domain that binds low density lipoprotein receptor (LDL-R). In some embodiments, the binding domain binds human LDL-R. In some of any embodiments, the binding domain is a single domain antibody (sdAb). In some of any embodiments, the binding domain is a single chain variable fragment (scFv).

[0062] Provided herein is a polynucleotide comprising a nucleic acid sequence encoding (i) a henipavirus envelope attachment glycoprotein G (G protein) or a biologically active portion thereof and (ii) a single domain antibody (sdAb) variable domain, wherein the sdAb variable domain is attached to the C-terminus of the G protein or the biologically active portion thereof. In some of any embodiments, the polynucleotide further comprises (iii) a nucleic acid sequence encoding a henipavirus F protein molecule or a biologically active portion thereof.

[0063] In some embodiments, the nucleic acid sequence is a first nucleic acid sequence and the polynucleotide further comprise a second nucleic acid sequence encoding a henipavirus F protein molecule or a biologically active portion thereof. In some embodiments, the polynucleotide comprise an IRES or a sequence encoding a linking peptide between the first and second nucleic acid sequence. In some embodiments, the linking peptide is a self-cleaving peptide or a peptide that causes ribosome skipping, optionally a T2A peptide.

[0064] In some of any embodiments, the polynucleotide includes at least one promoter that is operatively linked to control expression of the nucleic acid. In some of any embodiments, the promoter is operatively linked to control expression of the first nucleic acid sequence and the second nucleic acid sequence. In some of any embodiments, the promoter is a constitutive promoter. In some of any embodiments, the promoter is an inducible promoter.

[0065] In some of any embodiments, the sdAb variable domain is attached to the G protein via an encoded peptide linker. In some embodiments, the binding domain is attached to the G protein via an encoded peptide linker. In some of any embodiments, the encoded peptide linker comprises up to 25 amino acids in length. In some of any embodiments, the encoded peptide linker comprises up to 65 amino acids in length In some of any embodiments, the encoded peptide linker comprises from or from about 2 to 65 amino acids, 2 to 60 amino acids, 2 to 56 amino acids, 2 to 52 amino acids, 2 to 48 amino acids, 2 to 44 amino acids, 2 to 40 amino acids, 2 to 36 amino acids, 2 to 32 amino acids, 2 to 28 amino acids, 2 to 24 amino acids, 2 to 20 amino acids, 2 to 18 amino acids, 2 to 14 amino acids, 2 to 12 amino acids, 2 to 10 amino acids, 2 to 8 amino acids, 2 to 6 amino acids, 6 to 65 amino acids, 6 to 60 amino acids, 6 to 56 amino acids, 6 to 52 amino acids, 6 to 48 amino acids, 6 to 44 amino acids, 6 to 40 amino acids, 6 to 36 amino acids, 6 to 32 amino acids, 6 to 28 amino acids, 6 to 24 amino acids, 6 to 20 amino acids, 6 to 18 amino acids, 6 to 14 amino acids, 6 to 12 amino acids, 6 to 10 amino acids, 6 to 8 amino acids, 8 to 65 amino acids, 8 to 60 amino acids, 8 to 56 amino acids, 8 to 52 amino acids, 8 to 48 amino acids, 8 to 44 amino acids, 8 to 40 amino acids, 8 to 36 amino acids, 8 to 32 amino acids, 8 to 28 amino acids, 8 to 24 amino acids, 8 to 20 amino acids, 8 to 18 amino acids, 8 to 14 amino acids, 8 to 12 amino acids, 8 to 10 amino acids, 10 to 65 amino acids, 10 to 60 amino acids, 10 to 56 amino acids, 10 to 52 amino acids, 10 to 48 amino acids, 10 to 44 amino acids, 10 to 40 amino acids, 10 to 36 amino acids, 10 to 32 amino acids, 10 to 28 amino acids, 10 to 24 amino acids, 10 to 20 amino acids, 10 to 18 amino acids, 10 to 14 amino acids, 10 to 12 amino acids, 12 to 65 amino acids, 12 to 60 amino acids, 12 to 56 amino acids, 12 to 52 amino acids, 12 to 48 amino acids, 12 to 44 amino acids, 12 to 40 amino acids, 12 to 36 amino acids, 12 to 32 amino acids, 12 to 28 amino acids, 12 to 24 amino acids, 12 to 20 amino acids, 12 to 18 amino acids, 12 to 14 amino acids, 14 to 65 amino acids, 14 to 60 amino acids, 14 to 56 amino acids, 14 to 52 amino acids, 14 to 48 amino acids, 14 to 44 amino acids, 14 to 40 amino acids, 14 to 36 amino acids, 14 to 32 amino acids, 14 to 28 amino acids, 14 to 24 amino acids, 14 to 20 amino acids, 14 to 18 amino acids, 18 to 65 amino acids, 18 to 60 amino acids, 18 to 56 amino acids, 18 to 52 amino acids, 18 to 48 amino acids, 18 to 44 amino acids, 18 to 40 amino acids, 18 to 36 amino acids, 18 to 32 amino acids, 18 to 28 amino acids, 18 to 24 amino acids, 18 to 20 amino acids, 20 to 65 amino acids, 20 to 60 amino acids, 20 to 56 amino acids, 20 to 52 amino acids, 20 to 48 amino acids, 20 to 44 amino acids, 20 to 40 amino acids, 20 to 36 amino acids, 20 to 32 amino acids, 20 to 28 amino acids, 20 to 26 amino acids, 20 to 24 amino acids, 24 to 65 amino acids, 24 to 60 amino acids, 24 to 56 amino acids, 24 to 52 amino acids, 24 to 48 amino acids, 24 to 44 amino acids, 24 to 40 amino acids, 24 to 36 amino acids, 24 to 32 amino acids, 24 to 30 amino acids, 24 to 28 amino acids, 28 to 65 amino acids, 28 to 60 amino acids, 28 to 56 amino acids, 28 to 52 amino acids, 28 to 48 amino acids, 28 to 44 amino acids, 28 to 40 amino acids, 28 to 36 amino acids, 28 to 34 amino acids, 28 to 32 amino acids, 32 to 65 amino acids, 32 to 60 amino acids, 32 to 56 amino acids, 32 to 52 amino acids, 32 to 48 amino acids, 32 to 44 amino acids, 32 to 40 amino acids, 32 to 38 amino acids, 32 to 36 amino acids, 36 to 65 amino acids, 36 to 60 amino acids, 36 to 56 amino acids, 36 to 52 amino acids, 36 to 48 amino acids, 36 to 44 amino acids, 36 to 40 amino acids, 40 to 65 amino acids, 40 to 60 amino acids, 40 to 56 amino acids, 40 to 52 amino acids, 40 to 48 amino acids, 40 to 44 amino acids, 44 to 65 amino acids, 44 to 60 amino acids, 44 to 56 amino acids, 44 to 52 amino acids, 44 to 48 amino acids, 48 to 65 amino acids, 48 to 60 amino acids, 48 to 56 amino acids, 48 to 52 amino acids, 50 to 65 amino acids, 50 to 60 amino acids, 50 to 56 amino acids, 50 to 52 amino acids, 54 to 65 amino acids, 54 to 60 amino acids, 54 to 56 amino acids, 58 to 65 amino acids, 58 to 60 amino acids, or 60 to 65 amino acids.

[0066] In some of any embodiments, the encoded peptide linker comprises a polypeptide that is 3, 4, 5, 6, 7, 8, 9, 10, 11, 12, 13, 14, 15, 16, 17, 18, 19, 20, 21, 22, 23, 24, 25, 26, 27, 28, 29, 30, 31, 32, 33, 34, 35, 36, 37, 38, 39, 40, 41, 42, 43, 44, 45, 46, 47, 48, 49, 50, 51, 52, 53, 54, 55, 56, 57, 58, 59, 60, 61, 62, 63, 64 or 65 amino acids in length. In some of any embodiments, the encoded peptide linker comprises GS, GGS, GGGGS (SEQ ID NO:43), GGGGGS (SEQ ID NO:41) and combinations thereof. In some of any embodiments, the encoded peptide linker comprises (GGS)n, wherein n is 1 to 10. In some of any embodiments, the encoded peptide linker comprises (GGGGS)n (SEQ ID NO:42), wherein n is 1 to 10. In some of any embodiments, the encoded peptide linker comprises (GGGGGS)n (SEQ ID NO:27), wherein n is 1 to 4. In some of any embodiments, the sequence encoding the G protein is a wild-type Nipah virus G (NiV-G) protein or a Hendra virus G protein or is a functionally active variant or a biologically active portion thereof. In some embodiments, the variant is a variant thereof that exhibits reduced binding for the native binding partner. In some of any embodiments, the nucleic acid sequence encoding the G protein is a wild-type Nipah virus G (NiV-G) protein or a Hendra virus G protein or is a variant thereof that exhibits reduced binding for the native binding partner. In some embodiments, the encoded G protein is a wild-type NiV-G protein or a functionally active variant or a biologically active portion thereof. In some of any embodiments, the nucleic acid sequence encoding the G protein is a wild-type NiV-G protein. In some of any embodiments, the nucleic acid sequence encoding the G-protein is a mutant NiV-G protein that exhibits reduced binding to Ephrin B2 or Ephrin B3.

[0067] In some of any embodiments, the NiV-G protein or functionally active variant or biologically active portion thereof comprises the amino acid sequence set forth in SEQ ID NO:9, SEQ ID NO: 28 or SEQ ID NO: 44 or comprises an amino acid sequence having at least at or about 80%, at least at or about 81%, at least at or about 82%, at least at or about 83%, at or about 84%, at least at or about 85%, at least at or about 86%, or at least at or about 87%, at least at or about 88%, or at least at or about 89%, at least at or about 90%, at least at or about 91%, at least at or about 92%, at least at or about 93%, at least at or about 94%, at least at or about 95%, at or about 96%, at least at or about 97%, at least at or about 98%, or at least at or about 99% sequence identity to SEQ ID NO:9, SEQ ID NO:28 or SEQ ID NO:44. In some of any embodiments, the NiV-G protein is a biologically active portion that is truncated and lacks up to 40 contiguous amino acid residues at or near the N-terminus of the wild-type NiV-G protein (SEQ ID NO:9, SEQ ID NO:28 or SEQ ID NO:44). In some of any embodiments, the NiV-G protein is a biologically active portion that is truncated at the N-terminus of wild-type NiV-G and comprises the sequence set forth in any of SEQ ID NOS: 10-15, 35-40 or 45-50 or an amino acid sequence having at least at or about 80%, at least at or about 81%, at least at or about 82%, at least at or about 83%, at or about 84%, at least at or about 85%, at least at or about 86%, or at least at or about 87%, at least at or about 88%, or at least at or about 89%, at least at or about 90%, at least at or about 91%, at least at or about 92%, at least at or about 93%, at least at or about 94%, at least at or about 95%, at or about 96%, at least at or about 97%, at least at or about 98%, or at least at or about 99% sequence identity to SEQ ID NOs: 10-15, 35-40 or 45-50.

[0068] In some of any embodiments, the NiV-G protein is a biologically active portion that comprises a 5 amino acid truncation at or near the N-terminus of the wild-type NiV-G protein (SEQ ID NO:9, SEQ ID NO:28 or SEQ ID NO:44). In some of any embodiments, the NiV-G protein or the biologically active portion comprises the amino acid sequence set forth in SEQ ID NO: 10 or an amino acid sequence having at least at or about 80%, at least at or about 81%, at least at or about 82%, at least at or about 83%, at or about 84%, at least at or about 85%, at least at or about 86%, or at least at or about 87%, at least at or about 88%, or at least at or about 89%, at least at or about 90%, at least at or about 91%, at least at or about 92%, at least at or about 93%, at least at or about 94%, at least at or about 95%, at or about 96%, at least at or about 97%, at least at or about 98%, or at least at or about 99% sequence identity to SEQ ID NO:10. In some of any embodiments, NiV-G protein or the biologically active portion comprises the amino acid sequence set forth in SEQ ID NO: 35 or an amino acid sequence having at least at or about 80%, at least at or about 81%, at least at or about 82%, at least at or about 83%, at or about 84%, at least at or about 85%, at least at or about 86%, or at least at or about 87%, at least at or about 88%, or at least at or about 89%, at least at or about 90%, at least at or about 91%, at least at or about 92%, at least at or about 93%, at least at or about 94%, at least at or about 95%, at or about 96%, at least at or about 97%, at least at or about 98%, or at least at or about 99% sequence identity to SEQ ID NO:35. In some of any embodiments, the NiV-G protein or the biologically active portion comprises the amino acid sequence set forth in SEQ ID NO: 45 or an amino acid sequence having at least at or about 80%, at least at or about 81%, at least at or about 82%, at least at or about 83%, at or about 84%, at least at or about 85%, at least at or about 86%, or at least at or about 87%, at least at or about 88%, or at least at or about 89%, at least at or about 90%, at least at or about 91%, at least at or about 92%, at least at or about 93%, at least at or about 94%, at least at or about 95%, at or about 96%, at least at or about 97%, at least at or about 98%, or at least at or about 99% sequence identity to SEQ ID NO:45.

[0069] In some of any embodiments, NiV-G protein is a biologically active portion that comprises a 10 amino acid truncation at or near the N-terminus of the wild-type NiV-G protein (SEQ ID NO:9, SEQ ID NO:28 or SEQ ID NO:44). In some of any embodiments, the mutant NiV-G protein or the biologically active portion comprises the amino acid sequence set forth in SEQ ID NO: 11 or an amino acid sequence having at least at or about 80%, at least at or about 81%, at least at or about 82%, at least at or about 83%, at or about 84%, at least at or about 85%, at least at or about 86%, or at least at or about 87%, at least at or about 88%, or at least at or about 89%, at least at or about 90%, at least at or about 91%, at least at or about 92%, at least at or about 93%, at least at or about 94%, at least at or about 95%, at or about 96%, at least at or about 97%, at least at or about 98%, or at least at or about 99% sequence identity to SEQ ID NO:11. In some of any embodiments, the NiV-G protein or the biologically active portion comprises the amino acid sequence set forth in SEQ ID NO: 36 or an amino acid sequence having at least at or about 80%, at least at or about 81%, at least at or about 82%, at least at or about 83%, at or about 84%, at least at or about 85%, at least at or about 86%, or at least at or about 87%, at least at or about 88%, or at least at or about 89%, at least at or about 90%, at least at or about 91%, at least at or about 92%, at least at or about 93%, at least at or about 94%, at least at or about 95%, at or about 96%, at least at or about 97%, at least at or about 98%, or at least at or about 99% sequence identity to SEQ ID NO:36. In some of any embodiments, the NiV-G protein or the biologically active portion comprises the amino acid sequence set forth in SEQ ID NO: 46 or an amino acid sequence having at least at or about 80%, at least at or about 81%, at least at or about 82%, at least at or about 83%, at or about 84%, at least at or about 85%, at least at or about 86%, or at least at or about 87%, at least at or about 88%, or at least at or about 89%, at least at or about 90%, at least at or about 91%, at least at or about 92%, at least at or about 93%, at least at or about 94%, at least at or about 95%, at or about 96%, at least at or about 97%, at least at or about 98%, or at least at or about 99% sequence identity to SEQ ID NO:46.

[0070] In some of any embodiments, the is a biologically active portion that NiV-G protein comprises a 15 amino acid truncation at or near the N-terminus of the wild-type NiV-G protein (SEQ ID NO:9, SEQ ID NO:28 or SEQ ID NO:44). In some of any embodiments, the NiV-G protein or the biologically active portion comprises the amino acid sequence set forth in SEQ ID NO: 12 or an amino acid sequence having at least at or about 80%, at least at or about 81%, at least at or about 82%, at least at or about 83%, at or about 84%, at least at or about 85%, at least at or about 86%, or at least at or about 87%, at least at or about 88%, or at least at or about 89%, at least at or about 90%, at least at or about 91%, at least at or about 92%, at least at or about 93%, at least at or about 94%, at least at or about 95%, at or about 96%, at least at or about 97%, at least at or about 98%, or at least at or about 99% sequence identity to SEQ ID NO:12. In some of any embodiments, the NiV-G protein or the biologically active portion comprises the amino acid sequence set forth in SEQ ID NO: 37 or an amino acid sequence having at least at or about 80%, at least at or about 81%, at least at or about 82%, at least at or about 83%, at or about 84%, at least at or about 85%, at least at or about 86%, or at least at or about 87%, at least at or about 88%, or at least at or about 89%, at least at or about 90%, at least at or about 91%, at least at or about 92%, at least at or about 93%, at least at or about 94%, at least at or about 95%, at or about 96%, at least at or about 97%, at least at or about 98%, or at least at or about 99% sequence identity to SEQ ID NO:37. In some of any embodiments, the NiV-G protein or the biologically active portion comprises the amino acid sequence set forth in SEQ ID NO: 47 or an amino acid sequence having at least at or about 80%, at least at or about 81%, at least at or about 82%, at least at or about 83%, at or about 84%, at least at or about 85%, at least at or about 86%, or at least at or about 87%, at least at or about 88%, or at least at or about 89%, at least at or about 90%, at least at or about 91%, at least at or about 92%, at least at or about 93%, at least at or about 94%, at least at or about 95%, at or about 96%, at least at or about 97%, at least at or about 98%, or at least at or about 99% sequence identity to SEQ ID NO:47.

[0071] In some of any embodiments, the NiV-G protein is a biologically active portion that comprises a 20 amino acid truncation at or near the N-terminus of the wild-type NiV-G protein (SEQ ID NO:9, SEQ ID NO:28 or SEQ ID NO:44). In some of any embodiments, the NiV-G protein or the biologically active portion comprises the amino acid sequence set forth in SEQ ID NO: 13 or an amino acid sequence having at least at or about 80%, at least at or about 81%, at least at or about 82%, at least at or about 83%, at or about 84%, at least at or about 85%, at least at or about 86%, or at least at or about 87%, at least at or about 88%, or at least at or about 89%, at least at or about 90%, at least at or about 91%, at least at or about 92%, at least at or about 93%, at least at or about 94%, at least at or about 95%, at or about 96%, at least at or about 97%, at least at or about 98%, or at least at or about 99% sequence identity to SEQ ID NO:13. In some of any embodiments, NiV-G protein or the biologically active portion comprises the amino acid sequence set forth in SEQ ID NO: 38 or an amino acid sequence having at least at or about 80%, at least at or about 81%, at least at or about 82%, at least at or about 83%, at or about 84%, at least at or about 85%, at least at or about 86%, or at least at or about 87%, at least at or about 88%, or at least at or about 89%, at least at or about 90%, at least at or about 91%, at least at or about 92%, at least at or about 93%, at least at or about 94%, at least at or about 95%, at or about 96%, at least at or about 97%, at least at or about 98%, or at least at or about 99% sequence identity to SEQ ID NO:38. In some of any embodiments, the NiV-G protein or the biologically active portion comprises the amino acid sequence set forth in SEQ ID NO: 48 or an amino acid sequence having at least at or about 80%, at least at or about 81%, at least at or about 82%, at least at or about 83%, at or about 84%, at least at or about 85%, at least at or about 86%, or at least at or about 87%, at least at or about 88%, or at least at or about 89%, at least at or about 90%, at least at or about 91%, at least at or about 92%, at least at or about 93%, at least at or about 94%, at least at or about 95%, at or about 96%, at least at or about 97%, at least at or about 98%, or at least at or about 99% sequence identity to SEQ ID NO:48.

[0072] In some of any embodiments, the NiV-G protein is a biologically active portion that comprises a 25 amino acid truncation at or near the N-terminus of the wild-type NiV-G protein (SEQ ID NO:9, SEQ ID NO:28 or SEQ ID NO:44). In some of any embodiments, the NiV-G protein or the biologically active portion comprises the amino acid sequence set forth in SEQ ID NO: 14 or an amino acid sequence having at least at or about 80%, at least at or about 81%, at least at or about 82%, at least at or about 83%, at or about 84%, at least at or about 85%, at least at or about 86%, or at least at or about 87%, at least at or about 88%, or at least at or about 89%, at least at or about 90%, at least at or about 91%, at least at or about 92%, at least at or about 93%, at least at or about 94%, at least at or about 95%, at or about 96%, at least at or about 97%, at least at or about 98%, or at least at or about 99% sequence identity to SEQ ID NO:14. In some of any embodiments, the NiV-G protein or the biologically active portion comprises the amino acid sequence set forth in SEQ ID NO: 39 or an amino acid sequence having at least at or about 80%, at least at or about 81%, at least at or about 82%, at least at or about 83%, at or about 84%, at least at or about 85%, at least at or about 86%, or at least at or about 87%, at least at or about 88%, or at least at or about 89%, at least at or about 90%, at least at or about 91%, at least at or about 92%, at least at or about 93%, at least at or about 94%, at least at or about 95%, at or about 96%, at least at or about 97%, at least at or about 98%, or at least at or about 99% sequence identity to SEQ ID NO:39. In some of any embodiments, the NiV-G protein or the biologically active portion comprises the amino acid sequence set forth in SEQ ID NO: 49 or an amino acid sequence having at least at or about 80%, at least at or about 81%, at least at or about 82%, at least at or about 83%, at or about 84%, at least at or about 85%, at least at or about 86%, or at least at or about 87%, at least at or about 88%, or at least at or about 89%, at least at or about 90%, at least at or about 91%, at least at or about 92%, at least at or about 93%, at least at or about 94%, at least at or about 95%, at or about 96%, at least at or about 97%, at least at or about 98%, or at least at or about 99% sequence identity to SEQ ID NO:49.

[0073] In some of any embodiments, the NiV-G protein is a biologically active portion that comprises a 30 amino acid truncation at or near the N-terminus of the wild-type NiV-G protein (SEQ ID NO:9, SEQ ID NO:28 or SEQ ID NO:44). In some of any embodiments, the NiV-G protein or the biologically active portion comprises the amino acid sequence set forth in SEQ ID NO: 15 or an amino acid sequence having at least at or about 80%, at least at or about 81%, at least at or about 82%, at least at or about 83%, at or about 84%, at least at or about 85%, at least at or about 86%, or at least at or about 87%, at least at or about 88%, or at least at or about 89%, at least at or about 90%, at least at or about 91%, at least at or about 92%, at least at or about 93%, at least at or about 94%, at least at or about 95%, at or about 96%, at least at or about 97%, at least at or about 98%, or at least at or about 99% sequence identity to SEQ ID NO:15. In some of any embodiments, the NiV-G protein or the biologically active portion comprises the amino acid sequence set forth in SEQ ID NO: 40 or an amino acid sequence having at least at or about 80%, at least at or about 81%, at least at or about 82%, at least at or about 83%, at or about 84%, at least at or about 85%, at least at or about 86%, or at least at or about 87%, at least at or about 88%, or at least at or about 89%, at least at or about 90%, at least at or about 91%, at least at or about 92%, at least at or about 93%, at least at or about 94%, at least at or about 95%, at or about 96%, at least at or about 97%, at least at or about 98%, or at least at or about 99% sequence identity to SEQ ID NO:40. In some of any embodiments, the NiV-G protein or the biologically active portion comprises the amino acid sequence set forth in SEQ ID NO: 50 or an amino acid sequence having at least at or about 80%, at least at or about 81%, at least at or about 82%, at least at or about 83%, at or about 84%, at least at or about 85%, at least at or about 86%, or at least at or about 87%, at least at or about 88%, or at least at or about 89%, at least at or about 90%, at least at or about 91%, at least at or about 92%, at least at or about 93%, at least at or about 94%, at least at or about 95%, at or about 96%, at least at or about 97%, at least at or about 98%, or at least at or about 99% sequence identity to SEQ ID NO: 50.

[0074] In some of any embodiments, the NiV-G protein is a biologically active portion that has a 34 amino acid truncation at or near the N-terminus of the wild-type NiV-G protein (SEQ ID NO:9, SEQ ID NO:28 or SEQ ID NO:44). In some of any embodiments, the NiV-G protein or the biologically active portion has the amino acid sequence set forth in SEQ ID NO: 22 or an amino acid sequence having at or about 80%, at least at or about 81%, at least at or about 82%, at least at or about 83%, at or about 84%, at least at or about 85%, at least at or about 86%, or at least at or about 87%, at least at or about 88%, or at least at or about 89%, at least at or about 90%, at least at or about 91%, at least at or about 92%, at least at or about 93%, at least at or about 94%, at least at or about 95%, at or about 96%, at least at or about 97%, at least at or about 98%, or at least at or about 99% sequence identity to SEQ ID NO:22. In some of any embodiments, the NiV-G protein or the biologically active portion has the amino acid sequence set forth in SEQ ID NO: 53 or an amino acid sequence having at or about 80%, at least at or about 81%, at least at or about 82%, at least at or about 83%, at or about 84%, at least at or about 85%, at least at or about 86%, or at least at or about 87%, at least at or about 88%, or at least at or about 89%, at least at or about 90%, at least at or about 91%, at least at or about 92%, at least at or about 93%, at least at or about 94%, at least at or about 95%, at or about 96%, at least at or about 97%, at least at or about 98%, or at least at or about 99% sequence identity to SEQ ID NO:53.

[0075] In some of any embodiments, the G-protein is a mutant NiV-G protein that exhibits reduced binding to Ephrin B2 or Ephrin B3. In some of any embodiments, the mutant NiV-G protein comprises: one or more amino acid substitutions corresponding to amino acid substitutions selected from the group consisting of E501A, W504A, Q530A and E533A with reference to numbering set forth in SEQ ID NO:28. In some of any embodiments, the mutant NiV-G protein comprises amino acid substitutions E501A, W504A, Q530A and E533A with reference to numbering set forth in SEQ ID NO:28.

[0076] In some of any embodiments, the mutant NiV-G protein comprises: i) a truncation at or near the N-terminus; and ii) point mutations selected from the group consisting of E501A, W504A, Q530A and E533A. In some of any embodiments, the mutant NiV-G protein comprises the amino acid sequence set forth in SEQ ID NO: 16 or an amino acid sequence having at least at or about 80%, at least at or about 81%, at least at or about 82%, at least at or about 83%, at or about 84%, at least at or about 85%, at least at or about 86%, or at least at or about 87%, at least at or about 88%, or at least at or about 89%, at least at or about 90%, at least at or about 91%, at least at or about 92%, at least at or about 93%, at least at or about 94%, at least at or about 95%, at or about 96%, at least at or about 97%, at least at or about 98%, or at least at or about 99% sequence identity to SEQ ID NO:16. In some of any embodiments, the mutant NiV-G protein comprises the amino acid sequence set forth in SEQ ID NO: 51 or an amino acid sequence having at least at or about 80%, at least at or about 81%, at least at or about 82%, at least at or about 83%, at or about 84%, at least at or about 85%, at least at or about 86%, or at least at or about 87%, at least at or about 88%, or at least at or about 89%, at least at or about 90%, at least at or about 91%, at least at or about 92%, at least at or about 93%, at least at or about 94%, at least at or about 95%, at or about 96%, at least at or about 97%, at least at or about 98%, or at least at or about 99% sequence identity to SEQ ID NO:51.

[0077] In some of any embodiments, the F protein or the biologically active portion thereof is a wild-type Nipah virus F (NiV-F) protein or a Hendra virus F protein or is a functionally active variant or biologically active portion thereof. In some of any embodiments, the F protein or the biologically active portion thereof is a wild-type NiV-F protein or a functionally active variant or a biologically active portion thereof. In some of any embodiments, the NiV-F-protein or the functionally active variant or biologically active portion thereof comprises the amino acid sequence set forth in SEQ ID NO: 2, or an amino acid sequence having at or about 80%, at least at or about 81%, at least at or about 82%, at least at or about 83%, at or about 84%, at least at or about 85%, at least at or about 86%, or at least at or about 87%, at least at or about 88%, or at least at or about 89%, at least at or about 90%, at least at or about 91%, at least at or about 92%, at least at or about 93%, at least at or about 94%, at least at or about 95%, at or about 96%, at least at or about 97%, at least at or about 98%, or at least at or about 99% sequence identity to SEQ ID NO: 2.

[0078] In some of any embodiments, the NiV-F protein is a is a biologically active portion thereof that has a 20 amino acid truncation at or near the C-terminus of the wild-type NiV-F protein (SEQ ID NO:2). In some of any embodiments, the NiV-F protein or the biologically active portion has the sequence set forth in SEQ ID NO:5 or an amino acid sequence having at or about 80%, at least at or about 81%, at least at or about 82%, at least at or about 83%, at or about 84%, at least at or about 85%, at least at or about 86%, or at least at or about 87%, at least at or about 88%, or at least at or about 89%, at least at or about 90%, at least at or about 91%, at least at or about 92%, at least at or about 93%, at least at or about 94%, at least at or about 95%, at or about 96%, at least at or about 97%, at least at or about 98%, or at least at or about 99% sequence identity to SEQ ID NO: 5. In some of any embodiments, the NiV-F protein is a biologically active portion thereof that comprises i) a 20 amino acid truncation at or near the C-terminus of the wild-type NiV-F protein (SEQ ID NO:2); and ii) a point mutation on an N-linked glycosylation site.

[0079] In some of any embodiments, the NiV-F protein or the biologically active portion has the sequence set forth in SEQ ID NO:7 or an amino acid sequence having at or about 80%, at least at or about 81%, at least at or about 82%, at least at or about 83%, at or about 84%, at least at or about 85%, at least at or about 86%, or at least at or about 87%, at least at or about 88%, or at least at or about 89%, at least at or about 90%, at least at or about 91%, at least at or about 92%, at least at or about 93%, at least at or about 94%, at least at or about 95%, at or about 96%, at least at or about 97%, at least at or about 98%, or at least at or about 99% sequence identity to SEQ ID NO: 7.

[0080] In some of any embodiments, the NiV-F protein is a biologically active portion thereof that has a 22 amino acid truncation at or near the C-terminus of the wild-type NiV-F protein (SEQ ID NO:2). In some of any embodiments, the NiV-F protein or the biologically active portion has the sequence set forth in SEQ ID NO:8 or an amino acid sequence that is encoded by a sequence of nucleotides encoding a sequence having at or about 80%, at least at or about 81%, at least at or about 82%, at least at or about 83%, at or about 84%, at least at or about 85%, at least at or about 86%, or at least at or about 87%, at least at or about 88%, or at least at or about 89%, at least at or about 90%, at least at or about 91%, at least at or about 92%, at least at or about 93%, at least at or about 94%, at least at or about 95%, at or about 96%, at least at or about 97%, at least at or about 98%, or at least at or about 99% sequence identity to SEQ ID NO: 8.

[0081] In some of any embodiments, the NiV-F protein has the sequence set forth in SEQ ID NO:23 or an amino acid sequence having at or about 80%, at least at or about 81%, at least at or about 82%, at least at or about 83%, at or about 84%, at least at or about 85%, at least at or about 86%, or at least at or about 87%, at least at or about 88%, or at least at or about 89%, at least at or about 90%, at least at or about 91%, at least at or about 92%, at least at or about 93%, at least at or about 94%, at least at or about 95%, at or about 96%, at least at or about 97%, at least at or about 98%, or at least at or about 99% sequence identity to SEQ ID NO: 23. In some of any embodiments, the F protein comprises the sequence set forth in SEQ ID NO:23 and the G protein comprises the sequence set forth in SEQ ID NO:16. In some of any embodiments, the F protein consists or consists essentially of the sequence set forth in SEQ ID NO:23 and the G protein consists or consists essentially of the sequence set forth in SEQ ID NO:16.

[0082] Provided herein is a vector, comprising the polynucleotide of any of the embodiments described herein. In some of any embodiments, the vector is a mammalian vector, viral vector or artificial chromosome, optionally wherein the artificial chromosome is a bacterial artificial chromosome (BAC).

[0083] Provided herein is a plasmid, comprising the polynucleotide of any of the embodiments described herein. In some of any embodiments, the plasmid further comprises one or more nucleic acids encoding proteins for lentivirus production.

[0084] Provided herein is a cell comprising the polynucleotide of any of embodiments described herein or the vector of any of the embodiments described herein, or the plasmid of any of the embodiments described herein.

[0085] Provided herein is a method of making a targeted lipid particle comprising a henipavirus F protein molecule or biologically active portion thereof and a targeted envelope protein comprising a henipavirus envelope attachment glycoprotein G (G protein) or a biologically active portion thereof and a single domain antibody (sdAb) variable domain, the method comprising a) providing a cell that comprises a nucleic acid encoding a henipavirus F protein molecule or biologically active portion thereof and a nucleic acid encoding a targeted envelope protein, the targeted envelope protein comprising a henipavirus envelope attachment glycoprotein G (G protein) or a biologically active portion thereof and a single domain antibody (sdAb) variable domain; b) culturing the cell under conditions that allow for production of a targeted lipid particle, and c) separating, enriching, or purifying the targeted lipid particle from the cell, thereby making the targeted lipid particle.

[0086] Provided herein is a method of making a pseudotyped lentiviral vector, the method comprising a) providing a producer cell that comprises a lentiviral viral nucleic acid(s), a nucleic acid encoding a henipavirus F protein molecule or biologically active portion thereof, and a nucleic acid encoding a targeted envelope protein, said targeted envelope protein comprising a henipavirus envelope attachment glycoprotein G (G protein) or a biologically active portion thereof and a single domain antibody; b) culturing the cell under conditions that allow for production of the lentiviral vector, and c) separating, enriching, or purifying the lentiviral vector from the cell, thereby making the pseudotyped lentiviral vector.

[0087] In some of any embodiments, the single domain antibody binds a cell surface molecule present on a target cell. In some of any embodiments, the cell surface molecule is a protein, glycan, lipid or low molecular weight molecule. In some of any embodiments, the target cell is selected from the group consisting of tumor-infiltrating lymphocytes, T cells, neoplastic or tumor cells, virus-infected cells, stem cells, central nervous system (CNS) cells, hematopoeietic stem cells (HSCs), liver cells or fully differentiated cells. In some of any embodiments, the target cell is selected from the group consisting of a CD3+ T cell, a CD4+ Tcell, a CD8+ T cell, a hepatocyte, a haematepoietic stem cell, a CD34+ haematepoietic stem cell, a CD105+ haematepoietic stem cell, a CD117+ haematepoietic stem cell, a CD105+ endothelial cell, a B cell, a CD20+ B cell, a CD19+ B cell, a cancer cell, a CD133+ cancer cell, an EpCAM+ cancer cell, a CD19+ cancer cell, a Her2/Neu+ cancer cell, a GluA2+ neuron, a GluA4+ neuron, a NKG2D+ natural killer cell, a SLC1A3+ astrocyte, a SLC7A10+ adipocyte, or a CD30+ lung epithelial cell. In some of any embodiments, the single domain antibody binds an antigen or portion thereof present on a target cell.

[0088] Provided herein is a method of making a targeted lipid particle comprising a henipavirus F protein molecule or biologically active portion thereof and a targeted envelope protein comprising a henipavirus envelope attachment glycoprotein G (G protein) or a biologically active portion thereof and a binding domain, the method comprising a) providing a cell that comprises a nucleic acid encoding a henipavirus F protein molecule or biologically active portion thereof and a nucleic acid encoding a targeted envelope protein, the targeted envelope protein comprising a henipavirus envelope attachment glycoprotein G (G protein) or a biologically active portion thereof and binding domain, wherein the binding domain (i) binds a cell surface molecule selected from the group consisting of ASGR1, ASGR2, and TM4SF5, optionally human ASGR1, human ASGR2 and human ASGR2; (ii) binds a cell surface molecule selected from the group consisting of CD4 or CD8, optionally human CD4 or human CD8; or (iii) binds a cell surface molecule that is low density lipoprotein receptor (LDL-R), optionally human LDL-R; b) culturing the cell under conditions that allow for production of a targeted lipid particle, and c) separating, enriching, or purifying the targeted lipid particle from the cell, thereby making the targeted lipid particle.

[0089] Provided herein is a method of making a pseudotyped lentiviral vector, the method comprising a) providing a producer cell that comprises a lentiviral viral nucleic acid(s), a nucleic acid encoding a henipavirus F protein molecule or biologically active portion thereof, and a nucleic acid encoding a targeted envelope protein, said targeted envelope protein comprising a henipavirus envelope attachment glycoprotein G (G protein) or a biologically active portion thereof and binding domain, wherein the binding domain: (i) binds a cell surface molecule selected from the group consisting of ASGR1, ASGR2, and TM4SF5, optionally human ASGR1, human ASGR2 and human ASGR2; (ii) binds a cell surface molecule selected from the group consisting of CD4 or CD8, optionally human CD4 or human CD8; or (iii) binds a cell surface molecule that is low density lipoprotein receptor (LDL-R), optionally human LDL-R; b) culturing the producer cell under conditions that allow for production of a lentiviral vector, and c) separating, enriching, or purifying the lentiviral vector from the cell, thereby making the pseudotyped lentiviral vector.

[0090] In some of any embodiments, the binding domain is a single domain antibody. In some of any embodiments, the binding domain is a single chain variable fragment (scFv). In some of any embodiments, the cell surface molecule is selected from the group consisting of ASGR1, ASGR2 and TM4SF5. In some of any embodiments, the cell surface molecule is CD8 or CD4, In some of any embodiments, the cell surface molecule is LDL-R.

[0091] Provided herein is a method of making a targeted lipid particle comprising a henipavirus F protein molecule or biologically active portion thereof and a targeted envelope protein comprising a) providing a cell that comprises the polynucleotide of any of the embodiments provided herein the vector of any of the embodiments described herein, or the plasmid of any of the embodiments described herein; b) culturing the cell under conditions that allow for production of a targeted lipid particle, and c) separating, enriching, or purifying the targeted lipid particle particle from the cell, thereby making the targeted lipid particle.

[0092] Provided herein is a method of making a pseudotyped lentiviral vector, comprising: a) providing a producer cell that comprises a lentiviral viral nucleic acid(s), and the polynucleotide of any of the embodiments listed herein or the vector of any of the embodiments listed herein b) culturing the cell under conditions that allow for production of the lentiviral vector, and c) separating, enriching, or purifying the lentiviral vector from the cell, thereby making the pseudotyped lentiviral vector. In some of any embodiments, prior to step (b) the method further comprises providing the cell a polynucleotide encoding a henipavirus F protein molecule or biologically active portion thereof.

[0093] In some of any embodiments, the cell is a mammalian cell.

[0094] In some of any embodiments, the cell is a producer cell comprising viral nucleic acid. In some of any embodiments, the viral nucleic acid is a retroviral nucleic acid or lentiviral nucleic acid and the targeted lipid particle is a viral particle or a viral-like particle. In some of any embodiments, the viral particle or a viral-like particle is a retroviral particle or a retroviral-like particle. In some embodiments, the viral particle or a viral-like particle is a lentiviral particle or lentiviral-like particle.

[0095] In some of any embodiments, the viral nucleic acid(s) lacks one or more genes involved in viral replication. In some of any embodiments, the viral nucleic acid comprises a nucleic acid encoding a viral packaging protein selected from one or more of Gag, Pol, Rev and Tat. In some of any embodiments, the viral nucleic acid comprises:one or more of (e.g., all of) the following nucleic acid sequences: 5′ LTR (e.g., comprising U5 and lacking a functional U3 domain), Psi packaging element (Psi), Central polypurine tract (cPPT)/central termination sequence (CTS) (e.g. DNA flap), Poly A tail sequence, a posttranscriptional regulatory element (e.g. WPRE), a Rev response element (RRE), and 3′ LTR (e.g., comprising U5 and lacking a functional U3).

[0096] Provided herein is a producer cell comprising the polynucleotide of any of the embodiments listed herein or the vector of any of the embodiments listed herein, or the plasmid of any of the embodiments described herein.

[0097] In some of any embodiments, the producer cell further comprises a nucleic acid encoding a henipavirus F protein or a biologically active portion thereof.

[0098] In some of any embodiments, the cell further comprises a viral nucleic acid. In some of any embodiments, the viral nucleic acid is a lentiviral nucleic acid. Provided herein is a producer cell comprising (i) a viral nucleic acid(s) and (ii) nucleic acid encoding a henipavirus F protein molecule or biologically active portion thereof and (iii) a nucleic acid encoding a targeted envelope protein comprising a henipavirus envelope attachment glycoprotein G (G protein) or a biologically active portion thereof and a single domain antibody (sdAb) variable domain, optionally wherein the viral nucleic acid(s) are lentiviral nucleic acids. In some of any embodiments the single domain antibody binds a cell surface molecule present on a target cell. In some of any embodiments the cell surface molecule is a protein, glycan, lipid or low molecular weight molecule.

[0099] In some of any embodiments the target cell is selected from the group consisting of tumor-infiltrating lymphocytes, T cells, neoplastic or tumor cells, virus-infected cells, stem cells, central nervous system (CNS) cells, hematopoeietic stem cells (HSCs), liver cells or fully differentiated cells. In some of any embodiments the target cell is selected from the group consisting of a CD3+ T cell, a CD4+ Tcell, a CD8+ T cell, a hepatocyte, a haematepoietic stem cell, a CD34+ haematepoietic stem cell, a CD105+ haematepoietic stem cell, a CD117+ haematepoietic stem cell, a CD105+ endothelial cell, a B cell, a CD20+ B cell, a CD19+ B cell, a cancer cell, a CD133+ cancer cell, an EpCAM+ cancer cell, a CD19+ cancer cell, a Her2/Neu+ cancer cell, a GluA2+ neuron, a GluA4+ neuron, a NKG2D+ natural killer cell, a SLC1A3+ astrocyte, a SLC7A10+ adipocyte, or a CD30+ lung epithelial cell. In some of any embodiments the single domain antibody binds an antigen or portion thereof present on a target cell.

[0100] Provided herein is a producer cell comprising (i) a viral nucleic acid(s) and (ii) nucleic acid encoding a henipavirus F protein molecule or biologically active portion thereof and (iii) a nucleic acid encoding a targeted envelope protein comprising a henipavirus envelope attachment glycoprotein G (G protein) or a biologically active portion thereof and binding domain, wherein the binding domain (i) binds a cell surface molecule selected from the group consisting of ASGR1, ASGR2, and TM4SF5, optionally human ASGR1, human ASGR2 and human ASGR2; (ii) binds a cell surface molecule selected from the group consisting of CD4 or CD8, optionally human CD4 or human CD8; or (iii) binds a cell surface molecule that is low density lipoprotein receptor (LDL-R), optionally human LDL-R. In some of any embodiments the viral nucleic acid(s) are lentiviral nucleic acid.

[0101] In some of any embodiments the cell surface molecule or antigen is selected from the group consisting of ASGR1, ASGR2 and TM4SF5. In some of any embodiments, the cell surface molecule or antigen is CD8 or CD4. In some of any embodiments, the cell surface molecule or antigen is LDL-R.

[0102] In some of any embodiments, the viral nucleic acid(s) lacks one or more genes involved in viral replication. In some of any embodiments, the viral nucleic acid comprises a nucleic acid encoding a viral packaging protein selected from one or more of Gag, Pol, Rev and Tat.

[0103] In some of any embodiments, the viral nucleic acid comprises one or more of (e.g., all of) the following nucleic acid sequences: 5′ LTR (e.g., comprising U5 and lacking a functional U3 domain), Psi packaging element (Psi), Central polypurine tract (cPPT)/central termination sequence (CTS) (e.g. DNA flap), Poly A tail sequence, a posttranscriptional regulatory element (e.g. WPRE), a Rev response element (RRE), and 3′ LTR (e.g., comprising U5 and lacking a functional U3).

[0104] In some of any embodiments, the henipavirus F protein molecule or biologically active portion thereof comprises: (i) the sequence set forth in SEQ ID NO: 2; (ii) an amino acid sequence having at least at or about 80%, at least at or about 81%, at least at or about 82%, at least at or about 83%, at or about 84%, at least at or about 85%, at least at or about 86%, or at least at or about 87%, at least at or about 88%, or at least at or about 89%, at least at or about 90%, at least at or about 91%, at least at or about 92%, at least at or about 93%, at least at or about 94%, at least at or about 95%, at least at or about 96%, at least at or about 97%, at least at or about 98%, or at least at or about 99% sequence identity to SEQ ID NO:2. In some of any embodiments, the henipavirus F protein molecule or biologically active portion thereof comprises (i) the sequence set forth in SEQ ID NO: 5; (ii) an amino acid sequence having at least at or about 90%, at least at or about 91%, at least at or about 92%, at least at or about 93%, at least at or about 94%, at least at or about 95%, at least at or about 96%, at least at or about 97%, at least at or about 98%, or at least at or about 99% sequence identity to SEQ ID NO:5.

[0105] In some of any embodiments, the henipavirus F protein molecule or biologically active portion thereof comprises (i) the sequence set forth in SEQ ID NO: 7; (ii) an amino acid sequence having at least at or about 80%, at least at or about 81%, at least at or about 82%, at least at or about 83%, at or about 84%, at least at or about 85%, at least at or about 86%, or at least at or about 87%, at least at or about 88%, or at least at or about 89%, at least at or about 90%, at least at or about 91%, at least at or about 92%, at least at or about 93%, at least at or about 94%, at least at or about 95%, at least at or about 96%, at least at or about 97%, at least at or about 98%, or at least at or about 99% sequence identity to SEQ ID NO:7. In some of any embodiments, the henipavirus F protein molecule or biologically active portion thereof comprises (i) a sequence encoding by a nucleotide sequence encoding the sequence set forth in SEQ ID NO: 8; (ii) a amino acid sequence encoded by a nucleotide sequence encoding a sequence having at least at or about 80%, at least at or about 81%, at least at or about 82%, at least at or about 83%, at or about 84%, at least at or about 85%, at least at or about 86%, or at least at or about 87%, at least at or about 88%, or at least at or about 89%, at least at or about 90%, at least at or about 91%, at least at or about 92%, at least at or about 93%, at least at or about 94%, at least at or about 95%, at least at or about 96%, at least at or about 97%, at least at or about 98%, or at least at or about 99% sequence identity to SEQ ID NO:8.

[0106] In some of any embodiments, the henipavirus F protein molecule or biologically active portion thereof comprises: (i) the sequence set forth in SEQ ID NO: 23; (ii) an amino acid sequence having at least at or about 80%, at least at or about 81%, at least at or about 82%, at least at or about 83%, at or about 84%, at least at or about 85%, at least at or about 86%, or at least at or about 87%, at least at or about 88%, or at least at or about 89%, at least at or about 90%, at least at or about 91%, at least at or about 92%, at least at or about 93%, at least at or about 94%, at least at or about 95%, at least at or about 96%, at least at or about 97%, at least at or about 98%, or at least at or about 99% sequence identity to SEQ ID NO:23.

[0107] In some of any embodiments, the henipavirus envelope attachment glycoprotein G (G protein) or a biologically active portion thereof comprises: (i) the sequence set forth in SEQ ID NO:9, SEQ ID NO:28 or SEQ ID NO:44; (ii) an amino acid sequence having at least at or about 80%, at least at or about 81%, at least at or about 82%, at least at or about 83%, at or about 84%, at least at or about 85%, at least at or about 86%, or at least at or about 87%, at least at or about 88%, or at least at or about 89%, at least at or about 90%, at least at or about 91%, at least at or about 92%, at least at or about 93%, at least at or about 94%, at least at or about 95%, at least at or about 96%, at least at or about 97%, at least at or about 98%, or at least at or about 99% sequence identity to SEQ ID NO:9, SEQ ID NO:28 or SEQ ID NO:44.

[0108] In some of any embodiments, the henipavirus envelope attachment glycoprotein G (G protein) or a biologically active portion thereof comprises: (i) the sequence set forth in SEQ ID NO: 10; (ii) an amino acid sequence having at least at or about 80%, at least at or about 81%, at least at or about 82%, at least at or about 83%, at or about 84%, at least at or about 85%, at least at or about 86%, or at least at or about 87%, at least at or about 88%, or at least at or about 89%, at least at or about 90%, at least at or about 91%, at least at or about 92%, at least at or about 93%, at least at or about 94%, at least at or about 95%, at least at or about 96%, at least at or about 97%, at least at or about 98%, or at least at or about 99% sequence identity to SEQ ID NO:10.

[0109] In some of any embodiments, the henipavirus envelope attachment glycoprotein G (G protein) or a biologically active portion thereof comprises: (i) the sequence set forth in SEQ ID NO: 35; (ii) an amino acid sequence having at least at or about 80%, at least at or about 81%, at least at or about 82%, at least at or about 83%, at or about 84%, at least at or about 85%, at least at or about 86%, or at least at or about 87%, at least at or about 88%, or at least at or about 89%, at least at or about 90%, at least at or about 91%, at least at or about 92%, at least at or about 93%, at least at or about 94%, at least at or about 95%, at least at or about 96%, at least at or about 97%, at least at or about 98%, or at least at or about 99% sequence identity to SEQ ID NO:35.

[0110] In some of any embodiments, the henipavirus envelope attachment glycoprotein G (G protein) or a biologically active portion thereof comprises: (i) the sequence set forth in SEQ ID NO: 45; (ii) an amino acid sequence having at least at or about 80%, at least at or about 81%, at least at or about 82%, at least at or about 83%, at or about 84%, at least at or about 85%, at least at or about 86%, or at least at or about 87%, at least at or about 88%, or at least at or about 89%, at least at or about 90%, at least at or about 91%, at least at or about 92%, at least at or about 93%, at least at or about 94%, at least at or about 95%, at least at or about 96%, at least at or about 97%, at least at or about 98%, or at least at or about 99% sequence identity to SEQ ID NO:45.

[0111] In some of any embodiments, the henipavirus envelope attachment glycoprotein G (G protein) or a biologically active portion thereof comprises: (i) the sequence set forth in SEQ ID NO: 11; (ii) an amino acid sequence having at least at or about 80%, at least at or about 81%, at least at or about 82%, at least at or about 83%, at or about 84%, at least at or about 85%, at least at or about 86%, or at least at or about 87%, at least at or about 88%, or at least at or about 89%, at least at or about 90%, at least at or about 91%, at least at or about 92%, at least at or about 93%, at least at or about 94%, at least at or about 95%, at least at or about 96%, at least at or about 97%, at least at or about 98%, or at least at or about 99% sequence identity to SEQ ID NO:11.

[0112] In some of any embodiments, the henipavirus envelope attachment glycoprotein G (G protein) or a biologically active portion thereof comprises: (i) the sequence set forth in SEQ ID NO: 36; (ii) an amino acid sequence having at least at or about 80%, at least at or about 81%, at least at or about 82%, at least at or about 83%, at or about 84%, at least at or about 85%, at least at or about 86%, or at least at or about 87%, at least at or about 88%, or at least at or about 89%, at least at or about 90%, at least at or about 91%, at least at or about 92%, at least at or about 93%, at least at or about 94%, at least at or about 95%, at least at or about 96%, at least at or about 97%, at least at or about 98%, or at least at or about 99% sequence identity to SEQ ID NO:36.

[0113] In some of any embodiments, the henipavirus envelope attachment glycoprotein G (G protein) or a biologically active portion thereof comprises: (i) the sequence set forth in SEQ ID NO: 46; (ii) an amino acid sequence having at least at or about 80%, at least at or about 81%, at least at or about 82%, at least at or about 83%, at or about 84%, at least at or about 85%, at least at or about 86%, or at least at or about 87%, at least at or about 88%, or at least at or about 89%, at least at or about 90%, at least at or about 91%, at least at or about 92%, at least at or about 93%, at least at or about 94%, at least at or about 95%, at least at or about 96%, at least at or about 97%, at least at or about 98%, or at least at or about 99% sequence identity to SEQ ID NO:46.

[0114] In some of any embodiments, the henipavirus envelope attachment glycoprotein G (G protein) or a biologically active portion thereof comprises: (i) the sequence set forth in SEQ ID NO: 12; (ii) an amino acid sequence having at least at or about 80%, at least at or about 81%, at least at or about 82%, at least at or about 83%, at or about 84%, at least at or about 85%, at least at or about 86%, or at least at or about 87%, at least at or about 88%, or at least at or about 89%, at least at or about 90%, at least at or about 91%, at least at or about 92%, at least at or about 93%, at least at or about 94%, at least at or about 95%, at least at or about 96%, at least at or about 97%, at least at or about 98%, or at least at or about 99% sequence identity to SEQ ID NO:12.

[0115] In some of any embodiments, the henipavirus envelope attachment glycoprotein G (G protein) or a biologically active portion thereof comprises: (i) the sequence set forth in SEQ ID NO: 37; (ii) an amino acid sequence having at least at or about 80%, at least at or about 81%, at least at or about 82%, at least at or about 83%, at or about 84%, at least at or about 85%, at least at or about 86%, or at least at or about 87%, at least at or about 88%, or at least at or about 89%, at least at or about 90%, at least at or about 91%, at least at or about 92%, at least at or about 93%, at least at or about 94%, at least at or about 95%, at least at or about 96%, at least at or about 97%, at least at or about 98%, or at least at or about 99% sequence identity to SEQ ID NO:37.

[0116] In some of any embodiments, the henipavirus envelope attachment glycoprotein G (G protein) or a biologically active portion thereof comprises: (i) the sequence set forth in SEQ ID NO: 47; (ii) an amino acid sequence having at least at or about 80%, at least at or about 81%, at least at or about 82%, at least at or about 83%, at or about 84%, at least at or about 85%, at least at or about 86%, or at least at or about 87%, at least at or about 88%, or at least at or about 89%, at least at or about 90%, at least at or about 91%, at least at or about 92%, at least at or about 93%, at least at or about 94%, at least at or about 95%, at least at or about 96%, at least at or about 97%, at least at or about 98%, or at least at or about 99% sequence identity to SEQ ID NO:47.

[0117] In some of any embodiments, the henipavirus envelope attachment glycoprotein G (G protein) or a biologically active portion thereof comprises (i) the sequence set forth in SEQ ID NO: 13; (ii) an amino acid sequence having at least at or about 80%, at least at or about 81%, at least at or about 82%, at least at or about 83%, at or about 84%, at least at or about 85%, at least at or about 86%, or at least at or about 87%, at least at or about 88%, or at least at or about 89%, at least at or about 90%, at least at or about 91%, at least at or about 92%, at least at or about 93%, at least at or about 94%, at least at or about 95%, at least at or about 96%, at least at or about 97%, at least at or about 98%, or at least at or about 99% sequence identity to SEQ ID NO:13.

[0118] In some of any embodiments, the henipavirus envelope attachment glycoprotein G (G protein) or a biologically active portion thereof comprises: (i) the sequence set forth in SEQ ID NO: 38; (ii) an amino acid sequence having at least at or about 80%, at least at or about 81%, at least at or about 82%, at least at or about 83%, at or about 84%, at least at or about 85%, at least at or about 86%, or at least at or about 87%, at least at or about 88%, or at least at or about 89%, at least at or about 90%, at least at or about 91%, at least at or about 92%, at least at or about 93%, at least at or about 94%, at least at or about 95%, at least at or about 96%, at least at or about 97%, at least at or about 98%, or at least at or about 99% sequence identity to SEQ ID NO:38.

[0119] In some of any embodiments, the henipavirus envelope attachment glycoprotein G (G protein) or a biologically active portion thereof comprises: (i) the sequence set forth in SEQ ID NO: 48; (ii) an amino acid sequence having at least at or about 80%, at least at or about 81%, at least at or about 82%, at least at or about 83%, at or about 84%, at least at or about 85%, at least at or about 86%, or at least at or about 87%, at least at or about 88%, or at least at or about 89%, at least at or about 90%, at least at or about 91%, at least at or about 92%, at least at or about 93%, at least at or about 94%, at least at or about 95%, at least at or about 96%, at least at or about 97%, at least at or about 98%, or at least at or about 99% sequence identity to SEQ ID NO:48.

[0120] In some of any embodiments, the henipavirus envelope attachment glycoprotein G (G protein) or a biologically active portion thereof comprises (i) the sequence set forth in SEQ ID NO: 14; (ii) an amino acid sequence having at least at or about 80%, at least at or about 81%, at least at or about 82%, at least at or about 83%, at or about 84%, at least at or about 85%, at least at or about 86%, or at least at or about 87%, at least at or about 88%, or at least at or about 89%, at least at or about 90%, at least at or about 91%, at least at or about 92%, at least at or about 93%, at least at or about 94%, at least at or about 95%, at least at or about 96%, at least at or about 97%, at least at or about 98%, or at least at or about 99% sequence identity to SEQ ID NO:14.

[0121] In some of any embodiments, the henipavirus envelope attachment glycoprotein G (G protein) or a biologically active portion thereof comprises: (i) the sequence set forth in SEQ ID NO: 39; (ii) an amino acid sequence having at least at or about 80%, at least at or about 81%, at least at or about 82%, at least at or about 83%, at or about 84%, at least at or about 85%, at least at or about 86%, or at least at or about 87%, at least at or about 88%, or at least at or about 89%, at least at or about 90%, at least at or about 91%, at least at or about 92%, at least at or about 93%, at least at or about 94%, at least at or about 95%, at least at or about 96%, at least at or about 97%, at least at or about 98%, or at least at or about 99% sequence identity to SEQ ID NO:39.

[0122] In some of any embodiments, the henipavirus envelope attachment glycoprotein G (G protein) or a biologically active portion thereof comprises: (i) the sequence set forth in SEQ ID NO: 49; (ii) an amino acid sequence having at least at or about 80%, at least at or about 81%, at least at or about 82%, at least at or about 83%, at or about 84%, at least at or about 85%, at least at or about 86%, or at least at or about 87%, at least at or about 88%, or at least at or about 89%, at least at or about 90%, at least at or about 91%, at least at or about 92%, at least at or about 93%, at least at or about 94%, at least at or about 95%, at least at or about 96%, at least at or about 97%, at least at or about 98%, or at least at or about 99% sequence identity to SEQ ID NO:49.

[0123] In some of any embodiments, the henipavirus envelope attachment glycoprotein G (G protein) or a biologically active portion thereof comprises (i) the sequence set forth in SEQ ID NO: 15; (ii) an amino acid sequence having at least at or about 80%, at least at or about 81%, at least at or about 82%, at least at or about 83%, at or about 84%, at least at or about 85%, at least at or about 86%, or at least at or about 87%, at least at or about 88%, or at least at or about 89%, at least at or about 90%, at least at or about 91%, at least at or about 92%, at least at or about 93%, at least at or about 94%, at least at or about 95%, at least at or about 96%, at least at or about 97%, at least at or about 98%, or at least at or about 99% sequence identity to SEQ ID NO:15.

[0124] In some of any embodiments, the henipavirus envelope attachment glycoprotein G (G protein) or a biologically active portion thereof comprises: (i) the sequence set forth in SEQ ID NO: 40; (ii) an amino acid sequence having at least at or about 80%, at least at or about 81%, at least at or about 82%, at least at or about 83%, at or about 84%, at least at or about 85%, at least at or about 86%, or at least at or about 87%, at least at or about 88%, or at least at or about 89%, at least at or about 90%, at least at or about 91%, at least at or about 92%, at least at or about 93%, at least at or about 94%, at least at or about 95%, at least at or about 96%, at least at or about 97%, at least at or about 98%, or at least at or about 99% sequence identity to SEQ ID NO:40.

[0125] In some of any embodiments, the henipavirus envelope attachment glycoprotein G (G protein) or a biologically active portion thereof comprises: (i) the sequence set forth in SEQ ID NO: 50; (ii) an amino acid sequence having at least at or about 80%, at least at or about 81%, at least at or about 82%, at least at or about 83%, at or about 84%, at least at or about 85%, at least at or about 86%, or at least at or about 87%, at least at or about 88%, or at least at or about 89%, at least at or about 90%, at least at or about 91%, at least at or about 92%, at least at or about 93%, at least at or about 94%, at least at or about 95%, at least at or about 96%, at least at or about 97%, at least at or about 98%, or at least at or about 99% sequence identity to SEQ ID NO:50.

[0126] In some of any embodiments, the henipavirus envelope attachment glycoprotein G (G protein) or a biologically active portion thereof comprises (i) the sequence set forth in SEQ ID NO: 16; (ii) an amino acid sequence having at least at or about 80%, at least at or about 81%, at least at or about 82%, at least at or about 83%, at or about 84%, at least at or about 85%, at least at or about 86%, or at least at or about 87%, at least at or about 88%, or at least at or about 89%, at least at or about 90%, at least at or about 91%, at least at or about 92%, at least at or about 93%, at least at or about 94%, at least at or about 95%, at least at or about 96%, at least at or about 97%, at least at or about 98%, or at least at or about 99% sequence identity to SEQ ID NO:16.

[0127] In some of any embodiments, the henipavirus envelope attachment glycoprotein G (G protein) or a biologically active portion thereof comprises (i) the sequence set forth in SEQ ID NO: 51; (ii) an amino acid sequence having at least at or about 80%, at least at or about 81%, at least at or about 82%, at least at or about 83%, at or about 84%, at least at or about 85%, at least at or about 86%, or at least at or about 87%, at least at or about 88%, or at least at or about 89%, at least at or about 90%, at least at or about 91%, at least at or about 92%, at least at or about 93%, at least at or about 94%, at least at or about 95%, at least at or about 96%, at least at or about 97%, at least at or about 98%, or at least at or about 99% sequence identity to SEQ ID NO:51.

[0128] In some aspects of the provided embodiments, the targeted lipid particle has greater expression of the targeted envelope protein compared to a reference lipid particle that has incorporated into a similar lipid bilayer the same envelope protein but that is fused to an alternative targeting moiety, optionally wherein the alternative targeting moiety is a single chain variable fragment (scFv). In some of any embodiments, the expression is increased by at or greater than 5%, 10%, 20%, 30%, 40%, 50%, 60%, 70%, 80%, 90%, 100%, 125%, 150%, 200%, 300%, 400%, 500% or more. In some embodiments, the expression is increased by at or greater than 1.5-fold, 2-fold, 3-fold, 4-fold, 5-fold, 6-fold, 7-fold, 8-fold, 9-fold, 10-fold, 15-fold, 20-fold, 30-fold or more, preferably at or about or greater than 10-fold or more. In some of any embodiments, the titer in target cells following transduction is at or greater than 1×10⁶ transduction units (TU)/mL, at or greater than 2×10⁶ TU/mL, at or greater than 3×10⁶ TU/mL, at or greater than 4×10⁶ TU/mL, at or greater than 5×10⁶ TU/mL, at or greater than 6×10⁶ TU/mL, at or greater than 7×10⁶ TU/mL, at or greater than 8×10⁶ TU/mL, at or greater than 9×10⁶ TU/mL, or at or greater than 1×10⁷ TU/mL. Also provided herein is a composition wherein among the population of lipid particles, greater than at or about 50%, greater than at or about 55%, greater than at or about 60%, greater than at or about 65%, greater than at or about 70%, or greater than at or about 75% are surface positive for the targeted envelope protein. In some of any embodiments, the targeted envelope protein is present on the surface of the targeted lipid particle at a density of at least about (0.001, 0.002, 0.005, 0.01, 0.02, 0.05, 0.1, 0.2 or 0.5) targeted envelope proteins/nm².

[0129] Provided herein is a viral vector particle or viral-like particle produced from the producer cell of any of the embodiments provided herein.

[0130] Provided herein is a composition comprising a plurality of targeted lipid particles of any of the embodiments provided herein. In some embodiments, the composition further includes a pharmaceutically acceptable carrier. In some of any embodiments, the targeted lipid particles comprise an average diameter of less than 1 In some of any embodiments, the composition further includes a targeted envelope protein present on the surface of the targeted lipid particles at an average density of at least about (0.001, 0.002, 0.005, 0.01, 0.02, 0.05, 0.1, 0.2 or 0.5) targeted envelope proteins/nm².

[0131] Provided herein is a producer cell containing greater membrane (e.g., plasma membrane) expression of the targeted envelope protein compared to a reference producer cell that has incorporated into its membrane (e.g. plasma membrane) the same envelope protein but that is fused to an alternative targeting moiety, optionally wherein the alternative targeting moiety is a single chain variable fragment (scFv). In some embodiments, the expression is increased by at or greater than 5%, 10%, 20%, 30%, 40%, 50%, 60%, 70%, 80%, 90%, 100%, 125%, 150%, 200%, 300%, 400%, 500% or more. In some embodiments, the expression is increased by at or greater than 1.5-fold, 2-fold, 3-fold, 4-fold, 5-fold, 6-fold, 7-fold, 8-fold, 9-fold, 10-fold, 15-fold, 20-fold, 30-fold or more, preferably at or about or greater than 10-fold or more. In some embodiments, the producer cell has the expression of the targeted envelope protein on a membrane (e.g., plasma membrane) of the producer cell is at least 20 proteins (e.g., at least 50, 100, 200, 500, 1000, 2000, 5000, or 10,000 proteins) per square micron. In some of any embodiments, the targeted envelope protein comprises at least 0.1% (e.g., at least 0.2%, 0.5%, 1%, 2%, 3%, 4%, 5%, 6%, 7%, 8%, 9%, or 10%) of the total membrane (e.g., plasma membrane) proteins of the producer cell (e.g., by total protein weight).

[0132] Provided herein is a method of transducing a cell comprising transducing a cell with any of the viral vectors described herein or with any of the compositions described herein. In some of any embodiments, the targeted envelope protein of the lentiviral vector or targeted lipid particle targets CD4 and the cell is a CD4+ cell. In some of any embodiments, the targeted envelope protein of the lentiviral vector targets CD8 and the cell is a CD8+ cell. In some of any embodiments, the targeted envelope protein of the lentiviral vector targets ASGR1, ASGR2 or TM4SF5 and the cell is a hepatocyte.

[0133] Provided herein is a method of delivering an exogenous agent to a subject (e.g., a human subject), the method comprising administering to the subject the targeted lipid particle of any of the embodiments provided herein or the composition of any of the embodiments provided herein, wherein the targeted lipid particle or lentiviral vector comprise the exogenous agent.

[0134] Provided herein is a method of delivering an exogenous agent to a subject (e.g., a human subject), the method comprising administering to the subject any of the compositions described herein, wherein targeted lipid particle or lentiviral vectors of the plurality comprise the exogenous agent.

[0135] Provided herein is a method of delivering a chimeric antigen receptor (CAR) to a cell, comprising contacting a cell with any of the lentiviral vectors described herein or a targeted lipid particle of any of the embodiments described herein, wherein the lentiviral vector or targeted lipid particle comprise nucleic acid encoding the CAR.

[0136] Provided herein is a method of delivering a chimeric antigen receptor (CAR) to a cell, comprising contacting a cell with any of the compositions described herein, wherein lentiviral vectors or targeted lipid particles of the plurality comprise nucleic acid encoding the CAR.

[0137] Provided herein is a method of delivering an exogenous agent to a hepatocyte, comprising contacting a cell with any of the lentiviral vectors described herein, or a targeted lipid particle or lentiviral vector of any of the embodiments described herein.

[0138] Provided herein is a method of delivering an exogenous agent to a hepatocyte, comprising contacting a cell with any of the compositions described herein, wherein lentiviral vectors or targeted lipid particles of the plurality comprise an exogenous agent for delivery to the hepatocyte. In some of any embodiments, the contacting transduces the cell with lentiviral vector or the targeted lipid particle.

[0139] Provided herein is a method of treating a disease or disorder in a subject (e.g., a human subject), the method comprising administering to the subject the targeted lipid particle of any of the embodiments provided herein or the composition of any of the embodiments provided herein.

[0140] Provided herein is a method of fusing a mammalian cell to a targeted lipid particle, the method comprising administering to the subject the targeted lipid particle of any of the embodiments provided herein or the composition of any of the embodiments provided herein. In some of any embodiments, the fusing of the mammalian cell to the targeted lipid particle delivers an exogenous agent to a subject (e.g., a human subject). In some of any embodiments, the fusing of the mammalian cell to the targeted lipid particle treats a disease or disorder in a subject (e.g., a human subject). In some of any embodiments, the targeted envelope protein of the lentiviral vector or targeted lipid particle targets CD4 and the cell is a CD4+ cell. In some of any embodiments, the targeted envelope protein of the lentiviral vector targets CD8 and the cell is a CD8+ cell. In some of any embodiments, the targeted envelope protein of the lentiviral vector targets ASGR1, ASGR2 or TM4SF5 and the cell is a hepatocyte.

[0141] In some of any embodiments, the targeted lipid particle has greater expression of the targeted envelope protein compared to a reference lipid particle that has incorporated into a similar lipid bilayer the same envelope protein but that is fused to an alternative targeting moiety. In some embodiments, the alternative targeting moiety is a single chain variable fragment (scFv). In some of any embodiments, the expression is increased by at or greater than 5%, 10%, 20%, 30%, 40%, 50%, 60%, 70%, 80%, 90%, 100%, 125%, 150%, 200%, 300%, 400%, 500% or more. In some of any embodiments, the expression is increased by at or greater than 1.5-fold, 2-fold, 3-fold, 4-fold, 5-fold, 6-fold, 7-fold, 8-fold, 9-fold, 10-fold, 15-fold, 20-fold, 30-fold or more, preferably at or about or greater than 10-fold or more.

[0142] In some of any embodiments, the titer in target cells following transduction is at or greater than 1×10⁶ transduction units (TU)/mL, at or greater than 2×10⁶ TU/mL, at or greater than 3×10⁶ TU/mL, at or greater than 4×10⁶ TU/mL, at or greater than 5×10⁶ TU/mL, at or greater than 6×10⁶ TU/mL, at or greater than 7×10⁶ TU/mL, at or greater than 8×10⁶ TU/mL, at or greater than 9×10⁶ TU/mL, or at or greater than 1×10⁷ TU/mL.

[0143] In some of any embodiments, among the population of lipid particles or lentiviral vectors in the composition, greater than at or about 50%, greater than at or about 55%, greater than at or about 60%, greater than at or about 65%, greater than at or about 70%, or greater than at or about 75% are surface positive for the targeted envelope protein. In some of any embodiments, the targeted envelope protein is present on the surface of the targeted lipid particle at a density of at least about (0.001, 0.002, 0.005, 0.01, 0.02, 0.05, 0.1, 0.2 or 0.5) targeted envelope proteins/nm².

[0144] Provided herein is a composition comprising a plurality of the targeted lipid particles of any of the embodiments described herein or a plurality of lentiviral vectors of any of the embodiments described herein, wherein the targeted envelope protein is present on the surface of the targeted lipid particles at an average density of at least about (0.001, 0.002, 0.005, 0.01, 0.02, 0.05, 0.1, 0.2 or 0.5) targeted envelope proteins/nm².

[0145] In some of any embodiments, the producer cell has greater membrane (e.g., plasma membrane) expression of the targeted envelope protein compared to a reference producer cell that has incorporated into its membrane (e.g. plasma membrane) the same envelope protein but that is fused to an alternative targeting moiety, optionally wherein the alternative targeting moiety is a single chain variable fragment (scFv). In some of any embodiments, the expression is increased by at or greater than 5%, 10%, 20%, 30%, 40%, 50%, 60%, 70%, 80%, 90%, 100%, 125%, 150%, 200%, 300%, 400%, 500% or more. In some of any embodiments, the expression is increased by at or greater than 1.5-fold, 2-fold, 3-fold, 4-fold, 5-fold, 6-fold, 7-fold, 8-fold, 9-fold, 10-fold, 15-fold, 20-fold, 30-fold or more, preferably at or about or greater than 10-fold or more. In some of any embodiments, the producer cell has the expression of the targeted envelope protein on a membrane (e.g., plasma membrane) of the producer cell is at least 20 proteins (e.g., at least 50, 100, 200, 500, 1000, 2000, 5000, or 10,000 proteins) per square micron. In some of any embodiments, the targeted envelope protein comprises at least 0.1% (e.g., at least 0.2%, 0.5%, 1%, 2%, 3%, 4%, 5%, 6%, 7%, 8%, 9%, or 10%) of the total membrane (e.g., plasma membrane) proteins of the producer cell (e.g., by total protein weight).

### DETAILED DESCRIPTION

[0146] Provided herein are targeted lipid particles containing a lipid bilayer enclosing a lumen or cavity and a targeted envelope protein containing (1) a henipavirus envelope attachment glycoprotein G (G protein) or biologically active portion thereof and (2) a binding domain, such as a a single domain antibody (sdAb) variable domain, in which the targeted envelope protein is embedded in the lipid bilayer of the lipid particles. In particular embodiments, the binding domain, such as a single domain antibody, is an antibody with the ability to bind, such as specifically bind, to a desired target molecule. Exemplary binding domains are described in Section II.A.2. In some embodiments, the targeted lipid particles also contains a henipavirus fusion (F) protein molecule or a biologically active portion thereof embedded in the lipid bilayer. In particular embodiments, the lipid particles can be a virus-like particle, a virus, or a viral vector, such as a lentiviral vector.

[0147] In some embodiments, one or both of the G protein and the F protein is from a Hendra (HeV) or a Nipah (NiV) virus, or is a biologically active portion thereof or is a variant or mutant thereof. In particular embodiments, both the G protein and the F protein is from a Hendra (HeV) or a Nipah (NiV) virus. In some embodiments, the fusion and attachment glycoproteins mediate cellular entry of Nipah virus.

[0148] The F protein, such as NiV-F, is a class I fusion protein that has structural and functional features in common with fusion proteins of many families (e.g., HIV-1 gp41 or influenza virus hemagglutinin [HA]), such as an ectodomain with a hydrophobic fusion peptide and two heptad repeat regions (White JM et al. 2008. Crit Rev Biochem Mol Biol 43:189-219). F proteins are synthesized as inactive precursors F₀ and are activated by proteolytic cleavage into the two disulfide-linked subunits F₁ and F₂ (Moll M. et al. 2004. J. Virol. 78(18): 9705-9712).

[0149] G proteins are attachment proteins of henipavirus (e.g. Nipah virus or Hendra virus) that are type II transmembrane glycoproteins containing an N-terminal cytoplasmic tail, a transmembrane domain, an extracellular stalk, and a globular head (Liu, Q. et al. 2015. Journal of Virology, 89(3):1838-1850). The attachment protein, NiV-G, recognizes the receptors EphrinB2 and EphrinB3. Binding of the receptor to NiV-G triggers a series of conformational changes that eventually lead to the triggering of NiV-F, which exposes the fusion peptide of NiV-F, allowing another series of conformational changes that lead to virus-cell membrane fusion (Stone J. A. et al. 2016. J Virol. 90(23): 10762-10773). EphrinB2 was previously identified as the primary NiV receptor (Negrete et al., 2005), as well as EphrinB3 as an alternate receptor (Negrete et al., 2006). In fact, NiV-G has a high affinity for EphrinB2 and B3, with affinity binding constants (Kd) in the picomolar range (Negrete et al., 2006) (Kd=0.06 nM and 0.58 nM for cell surface expressed ephrinB2 and B3, respectively).

[0150] The efficiency of transduction of targeted lipid particles can be improved by engineering hyperfusogenic mutations in one or both of NiV-F and NiV-G. Several such mutations have been previously described (see, e.g., Lee at al, 2011, Trends in Microbiology). This could be useful, for example, for maintaining the specificity and picomolar affinity of NiV-G for EphrinB2 and/or B3. Additionally, mutations in NiV-G that completely abrogate EphrinB2 and B3 binding, but that do not impact the association of this NiV-G with NiV-F, have been identified. Methods to improve targeting of lipid particles can be achieved by fusion of a binding molecule with a G protein (e.g. Niv-G, including a Niv-G with mutations to abrogate ephrin B2 and ephrin B3 binding). This could allow for altered G protein tropism allowing for targeting of other desired cell types that are not EphrinB2+ through the addition of the binding molecule molecule directed against a different cell surface molecule.

[0151] While retargeted lipid particles incorporating such binding molecules fused to a G protein have been generated, it is found herein that some some binding molecules when fused with a G protein (e.g. NiV-G) express better on the surface of lipid particles than others. For example, it is found that single domain antibodies (sdAbs), such as VHH, may express 10-fold better than a single chain variable fragment (scFv). Without wishing to be bound by theory, the increase in expression may be due to an increased stability of the retargeted G protein on the surface of the lipid particle. This greater expression can improve the ability of the lipid particle to target the target molecule (e.g. a cell surface molecule) compared to a similar lipid particle but containing an alternative binding domain, e.g. scFv, against the same target molecule.

[0152] Thus, provided herein are targeted lipid particles containing a G protein of a henipavirus (e.g. Hendra or Nipah, e.g. NiV-G) attached to a sdAb variable domain directed against or that is able to bind to a cell surface molecule on a target cell. sdAb variable domains can include those of a VL or VH only sdAb, nanobodies, camelid VHH domains, shark IgNAR or fragments thereof. In some embodiments, the sdAb is a VHH.

[0153] In aspects of the provided embodiments, a targeted lipid particle can be engineered to express a henipavirus F protein molecule or biologically active portion thereof; and a targeted envelope protein comprising (i) a henipavirus envelope attachment glycoprotein G (G protein) or a biologically active portion thereof and (ii) single domain antibody (sdAb) variable domain, wherein the F protein molecule or the biologically active portion thereof and the targeted envelope protein are embedded in the lipid bilayer. In some embodiments, the sdAb variable domain is attached to the C-terminus of the G protein or the biologically active portion thereof. In some embodiments, the sdAb variable domain is attached to the G protein via a linker.

[0154] Also provided are targeted lipid particles additionally containing one or more exogenous agents, such as for delivery of a diagnostic or therapeutic agent to cells, including following in vivo administration to a subject. Also provided herein are methods and uses of the targeted lipid particles, such in diagnostic and therapeutic methods. Also provided are polynucleotides, methods for engineering, preparing, and producing the targeted lipid non-cell particles, compositions containing the particles, and kits and devices containing and for using, producing and administering the particles.

[0155] All publications, including patent documents, scientific articles and databases, referred to in this application are incorporated by reference in their entirety for all purposes to the same extent as if each individual publication were individually incorporated by reference. If a definition set forth herein is contrary to or otherwise inconsistent with a definition set forth in the patents, applications, published applications and other publications that are herein incorporated by reference, the definition set forth herein prevails over the definition that is incorporated herein by reference.

[0156] The section headings used herein are for organizational purposes only and are not to be construed as limiting the subject matter described.

### BRIEF DESCRIPTION OF THE DRAWINGS

[0157] FIGS. 1A-1C depict characterization of cells transfected with constructs containing scFv or VHH binding modalities. FIG. 1A depicts surface expression of cells transfected with constructs containing scFV or VHH binding modalities, analyzed by flow cytometry, and depicted as median fluorescence intensity (MFI), quantified by % of His+ cells. FIG. 1B depicts binding to soluble hCD4-Fc protein of cells transfected with constructs containing scFV of VHH binding modalities analyzed by flow cytometry, and depicted as median fluorescence intensity (MFI), quantified by % Fc+ cell. FIG. 1C depicts surface expression of targeted binding sequences on 293 cells for cells transfected with constructs containing VHH binding modalities, compared to the scFv binding modalities, analyzed by flow cytometry, and depicted as median fluorescence intensity (MFI), as quantified by % of His+ cells. Empty vector and the expression vector without the binder domain were used as negative controls.

[0158] FIG. 2 depicts transduction efficacy of four exemplary constructs containing scFV or VHH binding modalities on PanT cells from peripheral blood that were negatively selected to enrich for T cells were thawed and activated with anti CD3/anti-CD28. Cells were analyzed by flow cytometry, and titer determined by % of CD4-positive cells that were GFP+.

[0159] FIGS. 3A-3B depict transduction efficiency of CD8 retargeted pseudotyped lentiviruses in an in vivo model using activated PBMCs injected intraperitonally into NOD-scid-IL2rγ^{null} mice, as analyzed by flow cytometry. Transduciton efficiency of CD8 retargeted pseudotyped lentiviruses is depicted on CD8+ (FIG. 3A) or CD8− (FIG. 3B) T cells, and titer was determined by % of CD8 positive or negative cells that were GFP+.

[0160] FIGS. 4A-4B depict the ability of CD8 retargeted pseudotyped lentiviruses containing chimeric antigen receptors (CARs) to effect killing of leukemic cells in vitro. FIG. 4A shows the ability to detect CD19+ CAR expression on CD8+ cells at 4 days post transduction. FIG. 4B shows the elimination of Nalm6 cells evaluated at 18 hours post incubation, analyzed by flow cytometry

### I. DEFINITIONS

[0161] Unless defined otherwise, all terms of art, notations and other technical and scientific terms or terminology used herein are intended to have the same meaning as is commonly understood by one of ordinary skill in the art to which the claimed subject matter pertains. In some cases, terms with commonly understood meanings are defined herein for clarity and/or for ready reference, and the inclusion of such definitions herein should not necessarily be construed to represent a substantial difference over what is generally understood in the art.

[0162] Unless defined otherwise, all technical and scientific terms, acronyms, and abbreviations used herein have the same meaning as commonly understood by one of ordinary skill in the art to which the invention pertains. Unless indicated otherwise, abbreviations and symbols for chemical and biochemical names is per IUPAC-IUB nomenclature. Unless indicated otherwise, all numerical ranges are inclusive of the values defining the range as well as all integer values in-between.

[0163] As used herein, the articles “a” and “an” refer to one or to more than one (i.e. to at least one) of the grammatical object of the article. By way of example, “an element” means one element or more than one element.

[0164] As used herein, the term “about” will be understood by persons of ordinary skill in the art and will vary to some extent on the context in which it is used. As used herein, “about” when referring to a measurable value such as an amount, a temporal duration, and the like, is meant to encompass variations of ±20% or ±10%, more preferably ±5%, even more preferably ±1%, and still more preferably ±0.1% from the specified value, as such variations are appropriate to perform the disclosed methods.

[0165] As used herein, “lipid particle” refers to any biological or synthetic particle that contains a bilayer of amphipathic lipids enclosing a lumen or cavity. Typically a lipid particle does not contain a nucleus. Examples of lipid particles include solid particles such as nanoparticles, viral-derived particles or cell-derived particles. Such lipid particles include, but are not limited to, viral particles (e.g. lentiviral particles), virus-like particles, viral vectors (e.g., lentiviral vectors) exosomes, enucleated cells, various vesicles, such as a microvesicle, a membrane vesicle, an extracellular membrane vesicle, a plasma membrane vesicle, a giant plasma membrane vesicle, an apoptotic body, a mitoparticle, a pyrenocyte, or a lysosome. In some embodiments, a lipid particle can be a fusosome. In some embodiments, the lipid particle is not a platelet.

[0166] As used herein a “biologically active portion,” such as with reference to a protein such as a G protein or an F protein, refers to a portion of the protein that exhibits or retains an activity or property of the full-length of the protein. For example, a biologically active portion of an F protein retains fusogenic activity in conjunction with the G protein when each are embedded in a lipid bilayer. A biologically active portion of the G protein retains fusogenic activity in conjunction with an F protein when each is embedded in a lipid bilayer. The retained activity and include 10%-150% or more of the activity of a full-length or wild-type F protein or G protein. Examples of biologically active portions of F and G proteins include truncations of the cytoplasmic domain, e.g. truncations of up to 1, 2, 3, 4, 5, 6, 7, 8 9, 10, 11, 12, 13, 14, 15, 20, 25, 30, 35 or more contiguous amino acids, see e.g. Khetawat and Broder 2010 Virology Journal 7:312; Witting et al. 2013 Gene Therapy 20:997-1005; published international; patent application No. WO/2013/148327.

[0167] As used herein, “fusosome” refers to a particle containing a bilayer of amphipathic lipids enclosing a lumen or cavity and a fusogen that interacts with the amphipathic lipid bilayer. In embodiments, the fusosome comprises a nucleic acid. In some embodiments, the fusosome is a membrane enclosed preparation. In some embodiments, the fusosome is derived from a source cell.

[0168] As used herein, “fusosome composition” refers to a composition comprising one or more fusosomes.

[0169] As used herein, “fusogen” refers to an agent or molecule that creates an interaction between two membrane enclosed lumens. In embodiments, the fusogen facilitates fusion of the membranes. In other embodiments, the fusogen creates a connection, e.g., a pore, between two lumens (e.g., a lumen of a retroviral vector and a cytoplasm of a target cell). In some embodiments, the fusogen comprises a complex of two or more proteins, e.g., wherein neither protein has fusogenic activity alone. In some embodiments, the fusogen comprises a targeting domain.

[0170] As used herein, a “re-targeted fusogen” refers to a fusogen that comprises a targeting moiety having a sequence that is not part of the naturally-occurring form of the fusogen. In embodiments, the fusogen comprises a different targeting moiety relative to the targeting moiety in the naturally-occurring form of the fusogen. In embodiments, the naturally-occurring form of the fusogen lacks a targeting domain, and the re-targeted fusogen comprises a targeting moiety that is absent from the naturally-occurring form of the fusogen. In embodiments, the fusogen is modified to comprise a targeting moiety. In embodiments, the fusogen comprises one or more sequence alterations outside of the targeting moiety relative to the naturally-occurring form of the fusogen, e.g., in a transmembrane domain, fusogenically active domain, or cytoplasmic domain.

[0171] As used herein, a “targeted envelope protein” refers to a polypeptide that contains a henipavirus G protein attached to a single domain antibody (sdAb) variable domain, such as a VL or VH only sdAb, nanobodies, camelid VHH domains, shark IgNAR or fragments thereof, that targets a molecule on a desired cell type. In some such embodiments, the attachment may be directly or indirectly via a linker, such as a peptide linker.

[0172] As used herein, a “targeted lipid particle” refers to a lipid particle that contains a targeted envelope protein embedded in the lipid bilayer.

[0173] As used herein, a “retroviral nucleic acid” refers to a nucleic acid containing at least the minimal sequence requirements for packaging into a retrovirus or retroviral vector, alone or in combination with a helper cell, helper virus, or helper plasmid. In some embodiments, the retroviral nucleic acid further comprises or encodes an exogenous agent, a positive target cell-specific regulatory element, a non-target cell-specific regulatory element, or a negative TCSRE. In some embodiments, the retroviral nucleic acid comprises one or more of (e.g., all of) a 5′ LTR (e.g., to promote integration), U3 (e.g., to activate viral genomic RNA transcription), R (e.g., a Tat-binding region), U5, a 3′ LTR (e.g., to promote integration), a packaging site (e.g., psi (Ψ), RRE (e.g., to bind to Rev and promote nuclear export). The retroviral nucleic acid can comprise RNA (e.g., when part of a virion) or DNA (e.g., when being introduced into a source cell or after reverse transcription in a recipient cell). In some embodiments, the retroviral nucleic acid is packaged using a helper cell, helper virus, or helper plasmid which comprises one or more of (e.g., all of) gag, pol, and env.

[0174] As used herein, a “target cell” refers to a cell of a type to which it is desired that a targeted lipid particle delivers an exogenous agent. In embodiments, a target cell is a cell of a specific tissue type or class, e.g., an immune effector cell, e.g., a T cell. In some embodiments, a target cell is a diseased cell, e.g., a cancer cell. In some embodiments, the fusogen, e.g., re-targeted fusogen leads to preferential delivery of the exogenous agent to a target cell compared to a non-target cell.

[0175] As used herein a “non-target cell” refers to a cell of a type to which it is not desired that a targeted lipid particle delivers an exogenous agent. In some embodiments, a non-target cell is a cell of a specific tissue type or class. In some embodiments, a non-target cell is a non-diseased cell, e.g., a non-cancerous cell. In some embodiments, the fusogen, e.g., re-targeted fusogen leads to lower delivery of the exogenous agent to a non-target cell compared to a target cell.

[0176] As used herein, a “single domain antibody” or “sdAb” refers to an antibody having a single monomeric domain antigen binding/recognition domain. Such antibodies include nanobodies, camelid antibodies (e.g. VHH), or shark antibodies (e.g. IgNAR). In some embodiments, a variable domain of a sdAb comprises three CDRs and four framework regions, designated FR1, CDR1, FR2, CDR2, FR3, CDR3, and FR4. In some embodiments, a sdAb variable domain may be truncated at the N-terminus or C-terminus such that it comprise only a partial FR1 and/or FR4, or lacks one or both of those framework regions, so long as the sdAb variable domain substantially maintains antigen binding and specificity.

[0177] The term “CDR” denotes a complementarity determining region as defined by at least one manner of identification to one of skill in the art. The precise amino acid sequence boundaries of a given CDR or FR can be readily determined using any of a number of well-known schemes, including those described by Kabat et al. (1991), “Sequences of Proteins of Immunological Interest,” 5th Ed. Public Health Service, National Institutes of Health, Bethesda, Md. (“Kabat” numbering scheme); Al-Lazikani et al., (1997) JMB 273, 927-948 (“Chothia” numbering scheme); MacCallum et al., J. Mol. Biol. 262:732-745 (1996), “Antibody-antigen interactions: Contact analysis and binding site topography,” J. Mol. Biol. 262, 732-745.” (“Contact” numbering scheme); Lefranc M P et al., “IMGT unique numbering for immunoglobulin and T cell receptor variable domains and Ig superfamily V-like domains,” Dev Comp Immunol, 2003 January; 27(1):55-77 (“IMGT” numbering scheme); Honegger A and Plückthun A, “Yet another numbering scheme for immunoglobulin variable domains: an automatic modeling and analysis tool,” J Mol Biol, 2001 Jun. 8; 309(3):657-70, (“Aho” numbering scheme); and Martin et al., “Modeling antibody hypervariable loops: a combined algorithm,” PNAS, 1989, 86(23):9268-9272, (“AbM” numbering scheme).

[0178] The boundaries of a given CDR or FR may vary depending on the scheme used for identification. For example, the Kabat scheme is based on structural alignments, while the Chothia scheme is based on structural information. Numbering for both the Kabat and Chothia schemes is based upon the most common antibody region sequence lengths, with insertions accommodated by insertion letters, for example, “30a,” and deletions appearing in some antibodies. The two schemes place certain insertions and deletions (“indels”) at different positions, resulting in differential numbering. The Contact scheme is based on analysis of complex crystal structures and is similar in many respects to the Chothia numbering scheme. The AbM scheme is a compromise between Kabat and Chothia definitions based on that used by Oxford Molecular's AbM antibody modeling software.

[0179] In some embodiments, CDRs can be defined in accordance with any of the Chothia numbering schemes, the Kabat numbering scheme, a combination of Kabat and Chothia, the AbM definition, and/or the contact definition. A sdAb variable domain comprises three CDRs, designated CDR1, CDR2, and CDR3. Table 1, below, lists exemplary position boundaries of CDR-H1, CDR-H2, CDR-H3 as identified by Kabat, Chothia, AbM, and Contact schemes, respectively. For CDR-H1, residue numbering is listed using both the Kabat and Chothia numbering schemes. FRs are located between CDRs, for example, with FR-H1 located before CDR-H1, FR-H2 located between CDR-H1 and CDR-H2, FR-H3 located between CDR-H2 and CDR-H3 and so forth. It is noted that because the shown Kabat numbering scheme places insertions at H35A and H35B, the end of the Chothia CDR-H1 loop when numbered using the shown Kabat numbering convention varies between H32 and H34, depending on the length of the loop.

TABLE 1
Boundaries of CDRs according to various numbering schemes.

| CDR | Kabat | Chothia | AbM | Contact |
|---|---|---|---|---|
| CDR-H1 | H31--H35B | H26--H32 . . . 34 | H26--H35B | H30--H35B |
| (Kabat | | | | |
| Num- | | | | |
| bering¹) | | | | |
| CDR-H1 | H31--H35 | H26--H32 | H26--H35 | H30--H35 |
| (Chothia | | | | |
| Num- | | | | |
| bering²) | | | | |
| CDR-H2 | H50--H65 | H52--H56 | H50--H58 | H47--H58 |
| CDR-H3 | H95--H102 | H95--H102 | H95--H102 | H93--H101 |

¹Kabat et al. (1991), “Sequences of Proteins of Immunological Interest,” 5th Ed. Public Health Service, National Institutes of Health, Bethesda, MD
²Al-Lazikani et al., (1997) JMB 273, 927-948

[0180] Thus, unless otherwise specified, a “CDR” or “complementary determining region,” or individual specified CDRs (e.g., CDR-H1, CDR-H2, CDR-H3), of a given antibody or region thereof, such as a variable region thereof, should be understood to encompass a (or the specific) complementary determining region as defined by any of the aforementioned schemes. For example, where it is stated that a particular CDR (e.g., a CDR-H3) contains the amino acid sequence of a corresponding CDR in a given sdAb amino acid sequence, it is understood that such a CDR has a sequence of the corresponding CDR (e.g., CDR-H3) within the sdAb, as defined by any of the aforementioned schemes. It is understood that any antibody, such as a sdAb, includes CDRs and such can be identified according to any of the other aforementioned numbering schemes or other numbering schemes known to a skilled artisan.

[0181] As used herein, the term “specifically binds” to a target molecule, such as an antigen, means that a binding molecule, such as a single domain antibody, reacts or associates more frequently, more rapidly, with greater duration and/or with greater affinity with a particular target molecule than it does with alternative molecules. A binding molecule, such as a sdAb variable domain, “specifically binds” to a target molecule if it binds with greater affinity, avidity, more readily, and/or with greater duration than it binds to other molecules. It is understood that a binding molecule, such as a sdAb, that specifically binds to a first target may or may not specifically bind to a second target. As such, “specific binding” does not necessarily require (although it can include) exclusive binding.

[0182] As used herein, “percent (%) amino acid sequence identity” and “homology” with respect to a peptide, polypeptide or antibody sequence are defined as the percentage of amino acid residues in a candidate sequence that are identical with the amino acid residues in the specific peptide or polypeptide sequence, after aligning the sequences and introducing gaps, if necessary, to achieve the maximum percent sequence identity, and not considering any conservative substitutions as part of the sequence identity. Alignment for purposes of determining percent amino acid sequence identity can be achieved in various ways that are within the skill in the art, for instance, using publicly available computer software such as BLAST, BLAST-2, ALIGN or MEGALIGN™ (DNASTAR) software. Those skilled in the art can determine appropriate parameters for measuring alignment, including any algorithms needed to achieve maximal alignment over the full length of the sequences being compared.

[0183] An amino acid substitution may include but are not limited to the replacement of one amino acid in a polypeptide with another amino acid. Exemplary substitutions are shown in Table 2 Amino acid substitutions may be introduced into an antibody of interest and the products screened for a desired activity, for example, retained/improved binding.

TABLE 2

| Original Residue | Exemplary Substitutions |
|---|---|
| Ala (A) | Val; Leu; Ile |
| Arg (R) | Lys; Gln; Asn |
| Asn (N) | Gln; His; Asp, Lys; Arg |
| Asp (D) | Glu; Asn |
| Cys (C) | Ser; Ala |
| Gln (Q) | Asn; Glu |
| Glu (E) | Asp; Gln |
| Gly (G) | Ala |
| His (H) | Asn; Gln; Lys; Arg |
| Ile (I) | Leu; Val; Met; Ala; Phe; Norleucine |
| Leu (L) | Norleucine; Ile; Val; Met; Ala; Phe |
| Lys (K) | Arg; Gln; Asn |
| Met (M) | Leu; Phe; Ile |
| Phe (F) | Trp; Leu; Val; Ile; Ala; Tyr |
| Pro (P) | Ala |
| Ser (S) | Thr |
| Thr (T) | Val; Ser |
| Trp (W) | Tyr; Phe |
| Tyr (Y) | Trp; Phe; Thr; Ser |
| Val (V) | Ile; Leu; Met; Phe; Ala; Norleucine |

[0184] Amino acids may be grouped according to common side-chain properties:
[0185] (1) hydrophobic: Norleucine, Met, Ala, Val, Leu, Ile;
[0186] (2) neutral hydrophilic: Cys, Ser, Thr, Asn, Gln;
[0187] (3) acidic: Asp, Glu;
[0188] (4) basic: His, Lys, Arg;
[0189] (5) residues that influence chain orientation: Gly, Pro;
[0190] (6) aromatic: Trp, Tyr, Phe.

[0191] Non-conservative substitutions will entail exchanging a member of one of these classes for another class.

[0192] The term, “corresponding to” with reference to positions of a protein, such as recitation that nucleotides or amino acid positions “correspond to” nucleotides or amino acid positions in a disclosed sequence, such as set forth in the Sequence listing, refers to nucleotides or amino acid positions identified upon alignment with the disclosed sequence based on structural sequence alignment or using a standard alignment algorithm, such as the GAP algorithm. For example, corresponding residues of a similar sequence (e.g. fragment or species variant) can be determined by alignment to a reference sequence by structural alignment methods. By aligning the sequences, one skilled in the art can identify corresponding residues, for example, using conserved and identical amino acid residues as guides.

[0193] The term “isolated” as used herein refers to a molecule that has been separated from at least some of the components with which it is typically found in nature or produced. For example, a polypeptide is referred to as “isolated” when it is separated from at least some of the components of the cell in which it was produced. Where a polypeptide is secreted by a cell after expression, physically separating the supernatant containing the polypeptide from the cell that produced it is considered to be “isolating” the polypeptide. Similarly, a polynucleotide is referred to as “isolated” when it is not part of the larger polynucleotide (such as, for example, genomic DNA or mitochondrial DNA, in the case of a DNA polynucleotide) in which it is typically found in nature, or is separated from at least some of the components of the cell in which it was produced, for example, in the case of an RNA polynucleotide. Thus, a DNA polynucleotide that is contained in a vector inside a host cell may be referred to as “isolated”.

[0194] The term “effective amount” as used herein means an amount of a pharmaceutical composition which is sufficient enough to significantly and positively modify the symptoms and/or conditions to be treated (e.g., provide a positive clinical response). The effective amount of an active ingredient for use in a pharmaceutical composition will vary with the particular condition being treated, the severity of the condition, the duration of treatment, the nature of concurrent therapy, the particular active ingredient(s) being employed, the particular pharmaceutically-acceptable excipient(s) and/or carrier(s) utilized, and like factors with the knowledge and expertise of the attending physician.

[0195] An “exogenous agent” as used herein with reference to a targeted lipid particle, refers to an agent that is neither comprised by nor encoded in the corresponding wild-type virus or fusogen made from a corresponding wild-type source cell. In some embodiments, the exogenous agent does not naturally exist, such as a protein or nucleic acid that has a sequence that is altered (e.g., by insertion, deletion, or substitution) relative to a naturally occurring protein. In some embodiments, the exogenous agent does not naturally exist in the source cell. In some embodiments, the exogenous agent exists naturally in the source cell but is exogenous to the virus. In some embodiments, the exogenous agent does not naturally exist in the recipient cell. In some embodiments, the exogenous agent exists naturally in the recipient cell, but is not present at a desired level or at a desired time. In some embodiments, the exogenous agent comprises RNA or protein.

[0196] As used herein, a “promoter” refers to a cis-regulatory DNA sequence that, when operably linked to a gene coding sequence, drives transcription of the gene. The promoter may comprise a transcription factor binding sites. In some embodiments, a promoter works in concert with one or more enhancers which are distal to the gene.

[0197] As used herein, a composition refers to any mixture of two or more products, substances, or compounds, including cells. It may be a solution, a suspension, liquid, powder, a paste, aqueous, non-aqueous or any combination thereof.

[0198] As used herein, the term “pharmaceutically acceptable” refers to a material, such as carrier or diluent, which does not abrogate the biological activity or properties of the compound, and is relatively nontoxic, i.e., the material may be administered to an individual without causing undesirable biological effects or interacting in a deleterious manner with any of the components of the composition in which it is contained.

[0199] As used herein, the term “pharmaceutical. composition” refers to a mixture of at least one compound of the invention with other chemical components, such as carriers, stabilizers, diluents, dispersing agents, suspending agents, thickening agents, and/or excipients. The pharmaceutical composition facilitates administration of the compound to an organism. Multiple techniques of administering a compound exist in the art including, but not limited to, intravenous, oral, aerosol, parenteral, ophthalmic, pulmonary and topical administration.

[0200] A “disease” or “disorder” as used herein refers to a condition where treatment is needed and/or desired.

[0201] As used herein, the terms “treat,” “treating,” or “treatment” refer to ameliorating a disease or disorder, e.g., slowing or arresting or reducing the development of the disease or disorder or reducing at least one of the clinical symptoms thereof. For purposes of this disclosure, ameliorating a disease or disorder can include obtaining a beneficial or desired clinical result that includes, but is not limited to, any one or more of: alleviation of one or more symptoms, diminishment of extent of disease, preventing or delaying spread (for example, metastasis, for example metastasis to the lung or to the lymph node) of disease, preventing or delaying recurrence of disease, delay or slowing of disease progression, amelioration of the disease state, inhibiting the disease or progression of the disease, inhibiting or slowing the disease or its progression, arresting its development, and remission (whether partial or total).

[0202] The terms “individual” and “subject” are used interchangeably herein to refer to an animal; for example a mammal. The term patient includes human and veterinary subjects. In some embodiments, methods of treating mammals, including, but not limited to, humans, rodents, simians, felines, canines, equines, bovines, porcines, ovines, caprines, mammalian laboratory animals, mammalian farm animals, mammalian sport animals, and mammalian pets, are provided. The subject can be male or female and can be any suitable age, including infant, juvenile, adolescent, adult, and geriatric subjects. In some examples, an “individual” or “subject” refers to an individual or subject in need of treatment for a disease or disorder. In some embodiments, the subject to receive the treatment can be a patient, designating the fact that the subject has been identified as having a disorder of relevance to the treatment, or being at adequate risk of contracting the disorder. In particular embodiments, the subject is a human, such as a human patient.

### II. TARGETED LIPID PARTICLES (E.G. LENTIVIRAL VECTORS)

[0203] Provided herein are targeted lipid particles that comprise a henipavirus F protein molecule or biologically active portion thereof, and a targeted envelope protein comprising (i) a henipavirus envelope attachment glycoprotein G (G protein) or a biologically active portion thereof and (ii) binding domain, wherein the binding domain is attached to the C-terminus of the G protein or the biologically active portion, wherein each of (i) and (ii) is exposed on the outer surface of the targeted lipid particle. In some embodiments, the binding domain is a single domain antibody. In some embodiments, the binding domain is a single chain variable fragment. In particular embodiments, the provided lipid particles exhibit fusogenic activity, which is mediated by the targeted envelope protein that facilitates binding to a target cell and contains the G protein or biologically active portion thereof, and the F glycoprotein that is involved in facilitating the merger or fusion of the two lumens of the lipid particle and the target cell membranes.

[0204] Provided herein are targeted lipid particles that comprise a henipavirus F protein molecule or biologically active portion thereof, and a targeted envelope protein comprising (i) a henipavirus envelope attachment glycoprotein G (G protein) or a biologically active portion thereof and (ii) a single domain antibody (sdAb) variable domain, wherein the single domain antibody is attached to the C-terminus of the G protein or the biologically active portion, wherein each of (i) and (ii) is exposed on the outer surface of the targeted lipid particle. In particular embodiments, the provided lipid particles exhibit fusogenic activity, which is mediated by the targeted envelope protein that facilitates binding to a target cell and contains the G protein or biologically active portion thereof, and the F glycoprotein that is involved in facilitating the merger or fusion of the two lumens of the lipid particle and the target cell membranes.

[0205] In some of any embodiment, the targeted lipid particles are viral particles or viral-like particles. In some aspects, such targeted lipid particles contain viral nucleic acid, such as retroviral nucleic acid, for example lentiviral nucleic acid. In particular embodiments, any provided targeted lipid particles, such as a viral particle or viral-like particle, is replication defective. In some embodiments, the targeted lipid particle is a lentiviral vector, in which the lentiviral vector is pseudotyped with the henipavirus F protein and the targeted envelope protein.

[0206] For instance, provided herein is a pseudotyped lentiviral vector that comprises a henipavirus F protein molecule or biologically active portion thereof, and a targeted envelope protein comprising (i) a henipavirus envelope attachment glycoprotein G (G protein) or a biologically active portion thereof and (ii) binding domain, wherein the binding domain is attached to the C-terminus of the G protein or the biologically active portion, wherein each of (i) and (ii) is exposed on the outer surface of the targeted lipid particle. In some embodiments, the binding domain is a single domain antibody. In some embodiments, the binding domain is a single chain variable fragment.

[0207] In some embodiments, the targeted lipid particle provided herein (e.g. targeted lentiviral vector) has increased or greater expression of the targeted envelope protein compared to a reference lipid particle (e.g. reference lentiviral vector) that incorporates a similar envelope protein but that is fused to an alternative targeting moiety other than a sdAb variable domain, such as a single chain variable fragment (scFv). In some embodiments, such targeted lipid particles are produced by pseudotyping of lipid particles (e.g lentiviral particles) following co-transfection of the packaging cells with the transfer, envelope, and gag-pol plasmids.

[0208] In some embodiments, the expression is increased by at or greater than 5%, 10%, 20%, 30%, 40%, 50%, 60%, 70%, 80%, 90%, 100%, 125%, 150%, 200%, 300%, 400%, 500% or more, compared to a reference lipid particle (e.g. reference lentiviral vector), e.g. a reference lipid particle containing a similar envelope protein but that is fused to an scFv. In some examples, the expression is increased by at or greater than 1.5-fold, 2-fold, 3-fold, 4-fold, 5-fold, 6-fold, 7-fold, 8-fold, 9-fold, 10-fold, 15-fold, 20-fold, 30-fold or more, compared to a reference lipid particle (e.g. reference lentiviral vector), e.g. a reference lipid particle containing a similar envelope protein but that is fused to an scFv. In some embodiments, expression can be assayed in vitro using flow cytometry, e.g. FACs. In some embodiments, expression can be depicted as the number or density of targeted envelope protein on the surface of a targeted lipid particle (e.g. targeted lentiviral vector). In some embodiments, expression can be depicted as the mean fluorescent intensity (MFI) of surface expression of the targeted envelope protein on the surface of a targeted lipid particle (e.g. targeted lentiviral vector). In some embodiments, expression can be depicted as the percent of lipid particle (e.g. lentiviral vectors) in a population that are surface positive for the targeted envelope protein.

[0209] In some embodiments, in a population of targeted lipid particles (e.g. targeted lentiviral vectors) greater than at or about 50% of the lipid particles are surface positive for the targeted envelope protein. For example, in a population of provided targeted lipid particles (e.g. targeted lentiviral vectors) greater than at or about 55%, greater than at or about 60%, greater than at or about 65%, greater than at or about 70%, greater than at or about 75% of the cells in the population are surface positive for the targeted envelope protein.

[0210] In some embodiments, titer of the targeted lipid particles following introduction into target cells, such as by transduction (e.g. transduced cells), is increased compared to titer into the same target cells of reference lipid particles (e.g. reference lentiviral vector) that incorporate a similar envelope protein but fused to an alternative targeting moiety other than a sdAb variable domain, such as a single chain variable fragment (scFv). Typically, the alternative targeting moiety recognizes or binds the same target molecule as the sdAb variable domain of the targeted envelope protein of the targeted lipid particles. In some embodiments, the titer is increased by at or greater than 5%, 10%, 20%, 30%, 40%, 50%, 60%, 70%, 80%, 90%, 100%, 125%, 150%, 200%, 300%, 400%, 500% or more, compared to titer of a reference lipid particle (e.g. reference lentiviral vector), e.g. a reference lipid particle containing a similar envelope protein but that is fused to an scFv. In some examples, the titer is increased by at or greater than 1.5-fold, 2-fold, 3-fold, 4-fold, 5-fold, 6-fold, 7-fold, 8-fold, 9-fold, 10-fold, 15-fold, 20-fold, 30-fold or more, compared to the titer of a reference lipid particle (e.g. reference lentiviral vector), e.g. a reference lipid particle containing a similar envelope protein but that is fused to an scFv. In some embodiments, the titer of the targeted lipid particles in target cells (e.g. transduced cells) is greater than at or about 1×10⁶ transduction units (TU)/mL. For example, the titer of the targeted lipid particles in target cells (e.g. transduced cells) is greater than at or about 2×10⁶ TU/mL, greater than at or about 3×10⁶ TU/mL, greater than at or about 4×10⁶ TU/mL, greater than at or about 5×10⁶ TU/mL, greater than at or about 6×10⁶ TU/mL, greater than at or about 7×10⁶ TU/mL, greater than at or about 8×10⁶ TU/mL, greater than at or about 9×10⁶ TU/mL, or greater than at or about 1×10⁷ TU/mL.

[0211] A. Targeted Envelope Protein (e.g. Henipavirus Plus Binding Domain)

[0212] In some embodiments, the targeted lipid particle (e.g. lentiviral vector) includes a targeted envelope protein exposed on the surface of the targeted lipid particle (e.g. lentiviral vector).

[0213] In some embodiments, the targeted envelope protein contains a henipavirus envelope attachment glycoprotein G (G protein) or a biologically active portion thereof and a binding domain that binds to a cell surface molecule on a target cell. In some embodiments, the binding domain is a single domain antibody (sdAb). In some embodiments, the binding domain is a single chain variable fragment (scFv). The binding domain can be linked directly or indirectly to the G protein. In particular embodiments, the binding domain is linked to the C-terminus (C-terminal amino acid) of the G protein or the biologically active portion thereof. The linkage can be via a peptide linker, such as a flexible peptide linker.

[0214] I. Protein

[0215] In some embodiments, the targeted envelope protein contains a henipavirus envelope attachment glycoprotein G (G protein) or a biologically active portion thereof and a single domain antibody (sdAb) variable domain or biologically active portion thereof. In some embodiments, the sdAb binds to a cell surface molecule on a target cell. The sdAb variable domain can be linked directly or indirectly to the G protein. In particular embodiments, the sdAb variable domain is linked to the C-terminus (C-terminal amino acid) of the G protein or the biologically active portion thereof. The linkage can be via a peptide linker, such as a flexible peptide linker.

[0216] In some embodiments, an binding domain (e.g. sdAb) binds to a cell surface antigen of a cell. In some embodiments, a cell surface antigen is characteristic of one type of cell. In some embodiments, a cell surface antigen is characteristic of more than one type of cell.

[0217] In some embodiments, the binding domain (e.g. sdAb) variable domain binds a cell surface molecule or antigen. In some embodiments, the cell surface molecule is ASGR1, ASGR2, TM4SF5, CD8, CD4, or low density lipoprotein receptor (LDL-R). In some embodiments, the cell surface molecule is ASGR1. In some embodiments, the cell surface molecule is ASGR2. In some embodiments, the cell surface molecule is TM4SF5. In some embodiments, the cell surface molecule is CD8. In some embodiments, the cell surface molecule is CD4. In some embodiments, the cell surface molecule is LDL-R.

[0218] In some embodiments the G protein is a Henipavirus G protein or a biologically active portion thereof. In some embodiments, the Henipavirus G protein is a Hendra (HeV) virus G protein, a Nipah (NiV) virus G-protein (NiV-G), a Cedar (CedPV) virus G-protein, a Mojiang virus G-protein, a bat Paramyxovirus G-protein or a biologically active portion thereof. Table 3 provides non-limiting examples of G proteins.

[0219] The attachment G proteins are type II transmembrane glycoproteins containing an N-terminal cytoplasmic tail (e.g. corresponding to amino acids 1-49 of SEQ ID NO:9), a transmembrane domain (e.g. corresponding to amino acids 50-70 of SEQ ID NO:9), and an extracellular domain containing an extracellular stalk (e.g. corresponding to amino acids 71-187 of SEQ ID NO:9), and a globular head (corresponding to amino acids 188-602 of SEQ ID NO:9). The N-terminal cytoplasmic domain is within the inner lumen of the lipid bilayer and the C-terminal portion is the extracellular domain that is exposed on the outside of the lipid bilayer. Regions of the stalk in the C-terminal region (e.g. corresponding to amino acids 159-167 of NiV-G) have been shown to be involved in interactions with F protein and triggering of F protein fusion (Liu et al. 2015 J of Virology 89:1838). In wild-type G protein, the globular head mediates receptor binding to henipavirus entry receptors eprhin B2 and ephrin B3, but is dispensable for membrane fusion (Brandel-Tretheway et al. Journal of Virology. 2019. 93(13)e00577-19). In particular embodiments herein, tropism of the G protein is altered by linkage of the G protein or biologically active fragment thereof (e.g. cytoplasmic truncation) to a sdAb variable domain. Binding of the G protein to a binding partner can trigger fusion mediated by a compatible F protein or biologically active portion thereof. G protein sequences disclosed herein are predominantly disclosed as expressed sequences including an N-terminal methionine required for start of translation. As such N-terminal methionines are commonly cleaved co- or post-translationally, the mature protein sequences for all G protein sequences disclosed herein are also contemplated as lacking the N-terminal methionine.

[0220] G glycoproteins are highly conserved between henipavirus species. For example, the G protein of NiV and HeV viruses share 79% amino acids identity. Studies have shown a high degree of compatibility among G proteins with F proteins of different species as demonstrated by heterotypic fusion activation (Brandel-Tretheway et al. Journal of Virology. 2019). As described further below, a re-targeted lipid particle can contain heterologous G and F proteins from different species.

TABLE 3
Henipavirus protein G sequence clusters. Column 1, Genbank ID includes the
Genbank ID of the whole genome sequence of the virus that is the centroid sequence of the
cluster. Column 2, nucleotides of CDS provides the nucleotides corresponding to the CDS of
the gene in the whole genome. Column 3, Full Gene Name, provides the full name of the gene
including Genbank ID, virus species, strain, and protein name. Column 4, Sequence, provides
the amino acid sequence of the gene. Column 5, #Sequences/Cluster, provides the number of
sequences that cluster with this centroid sequence. Column 6 provides the SEQ ID numbers for
the described sequences.

| | | | | | | SEQ |
|---|---|---|---|---|---|---|
| | | | | | | ID |
| | | | | | | NO |
| | | | | | | (without |
| | Nucleotides | | | | SEQ | N- |
| Genbank | of | Full sequence | | #Sequences/ | ID | terminal |
| ID | CDS | ID | Sequence | Cluster | NO | methionine) |
| AF017 | 8913- | gb: AF017149\| | MMADSKLVSLNNNLSGKIKDQGKVIKN | 14 | 18 | 52 |
| 149 | 10727 | Organism: Hen | YYGTMDIKKINDGLLDSKILGAFNTVIA | | | |
| | | dra | LLGSIIIIVMNIMIIQNYTRTTDNQALIKES | | | |
| | | virus\|Strain | LQSVQQQIKALTDKIGFEIGPKVSLIDTSS | | | |
| | | Name: UNKN | TITIPANIGLLGSKISQSTSSINENVNDKC | | | |
| | | OWN- | KFTLPPLKIHECNISCPNPLPFREYRPISQ | | | |
| | | AF017149\|Pro | GVSDLVGLPNQICLQKTTSTILKPRLISY | | | |
| | | tein | TLPINTREGVCITDPLLAVDNGFFAYSHL | | | |
| | | Name: glycopr | EKIGSCTRGIAKQRIIGVGEVLDRGDKVP | | | |
| | | otein\|Gene | SMFMTNVWTPPNPSTIHHCSSTYHEDFY | | | |
| | | Symbol: G | YTLCAVSHVGDPILNSTSWTESLSLIRLA | | | |
| | | | VRPKSDSGDYNQKYIAITKVERGKYDK | | | |
| | | | VMPYGPSGIKQGDTLYFPAVGFLPRTEF | | | |
| | | | QYNDSNCPIIHCKYSKAENCRLSMGVNS | | | |
| | | | KSHYILRSGLLKYNLSLGGDIILQFIEIAD | | | |
| | | | NRLTIGSPSKIYNSLGQPVFYQASYSWD | | | |
| | | | TMIKLGDVDTVDPLRVQWRNNSVISRP | | | |
| | | | GQSQCPRFNVCPEVCWEGTYNDAFLIDR | | | |
| | | | LNWVSAGVYLNSNQTAENPVFAVFKDN | | | |
| | | | EILYQVPLAEDDTNAQKTITDCFLLENVI | | | |
| | | | WCISLVEIYDTGDSVIRPKLFAVKIPAQC | | | |
| | | | SES | | | |
| AF212 | 8943- | gb: AF2123021 | MPAENKKVRFENTTSDKGKIPSKVIKSY | 14 | 28 | 44 |
| 302 | 10751 | Organism: Nip | YGTMDIKKINEGLLDSKILSAFNTVIALL | | | |
| | | ah virus\|Strain | GSIVIIVMNIMIIQNYTRSTDNQAVIKDA | | | |
| | | Name: UNKN | LQGIQQQIKGLADKIGTEIGPKVSLIDTSS | | | |
| | | OWN- | TITIPANIGLLGSKISQSTASINENVNEKC | | | |
| | | AF212302\|Pro | KFTLPPLKIHECNISCPNPLPFREYRPQTE | | | |
| | | tein | GVSNLVGLPNNICLQKTSNQILKPKLISY | | | |
| | | Name: attachm | TLPVVGQSGTCITDPLLAMDEGYFAYSH | | | |
| | | ent | LERIGSCSRGVSKQRIIGVGEVLDRGDEV | | | |
| | | glycoprotein\|G | PSLFMTNVWTPPNPNTVYHCSAVYNNE | | | |
| | | ene Symbol: G | FYYVLCAVSTVGDPILNSTYWSGSLMM | | | |
| | | | TRLAVKPKSNGGGYNQHQLALRSIEKG | | | |
| | | | RYDKVMPYGPSGIKQGDTLYFPAVGFL | | | |
| | | | VRTEFKYNDSNCPITKCQYSKPENCRLS | | | |
| | | | MGIRPNSHYILRSGLLKYNLSDGENPKV | | | |
| | | | VFIEISDQRLSIGSPSKIYDSLGQPVFYQA | | | |
| | | | SFSWDTMIKFGDVLTVNPLVVNWRNNT | | | |
| | | | VISRPGQSQCPRFNTCPEICWEGVYNDA | | | |
| | | | FLIDRINWISAGVFLDSNQTAENPVFTVF | | | |
| | | | KDNEILYRAQLASEDTNAQKTITNCFLL | | | |
| | | | KNKIWCISLVEIYDTGDNVIRPKLFAVKI | | | |
| | | | PEQCT | | | |
| JQ001 | 8170- | gb: JQ001776: | MLSQLQKNYLDNSNQQGDKMNNPDKK | 3 | 29 | 54 |
| 776 | 10275 | 8170- | LSVNFNPLELDKGQKDLNKSYYVKNKN | | | |
| | | 10275\|Organis | YNVSNLLNESLHDIKFCIYCIFSLLIIITIIN | | | |
| | | m: Cedar | IITISIVITRLKVHEENNGMESPNLQSIQD | | | |
| | | virus\|S train | SLSSLTNMINTEITPRIGILVTATSVTLSSS | | | |
| | | Name: CG1a\|Pr | INYVGTKTNQLVNELKDYITKSCGFKVP | | | |
| | | otein | ELKLHECNISCADPKISKSAMYSTNAYA | | | |
| | | Name: attachm | ELAGPPKIFCKSVSKDPDFRLKQIDYVIP | | | |
| | | ent | VQQDRSICMNNPLLDISDGFFTYIHYEGI | | | |
| | | glycoprotein\|G | NSCKKSDSFKVLLSHGEIVDRGDYRPSL | | | |
| | | ene Symbol: G | YLLSSHYHPYSMQVINCVPVTCNQSSFV | | | |
| | | | FCHISNNTKTLDNSDYSSDEYYITYFNGI | | | |
| | | | DRPKTKKIPINNMTADNRYIHFTFSGGG | | | |
| | | | GVCLGEEFIIPVTTVINTDVFTHDYCESF | | | |
| | | | NCSVQTGKSLKEICSESLRSPTNSSRYNL | | | |
| | | | NGIMIISQNNMTDFKIQLNGITYNKLSFG | | | |
| | | | SPGRLSKTLGQVLYYQSSMSWDTYLKA | | | |
| | | | GFVEKWKPFTPNWMNNTVISRPNQGNC | | | |
| | | | PRYHKCPEICYGGTYNDIAPLDLGKDMY | | | |
| | | | VSVILDSDQLAENPEITVFNSTTILYKER | | | |
| | | | VSKDELNTRSTTTSCFLFLDEPWCISVLE | | | |
| | | | TNRFNGKSIRPEIYSYKIPKYC | | | |
| NC_02 | 9117- | gb: NC_02525 | MPQKTVEFINMNSPLERGVSTLSDKKTL | 2 | 30 | 55 |
| 5256 | 11015 | 6: 9117- | NQSKITKQGYFGLGSHSERNWKKQKNQ | | | |
| | | 11015\|Organis | NDHYMTVSTMILEILVVLGIMFNLIVLT | | | |
| | | m: Bat | MVYYQNDNINQRMAELTSNITVLNLNL | | | |
| | | Paramyxovirus | NQLTNKIQREIIPRITLIDTATTITIPSAITY | | | |
| | | Eid_he1/GH- | ILATLTTRISELLPSINQKCEFKTPTLVLN | | | |
| | | M74a/GHA/20 | DCRINCTPPLNPSDGVKMSSLATNLVAH | | | |
| | | 09\|Strain | GPSPCRNFSSVPTIYYYRIPGLYNRTALD | | | |
| | | Name: BatPV/ | ERCILNPRLTISSTKFAYVHSEYDKNCTR | | | |
| | | Eid_he1/GH- | GFKYYELMTFGEILEGPEKEPRMFSRSF | | | |
| | | M74a/GHA/20 | YSPTNAVNYHSCTPIVTVNEGYFLCLEC | | | |
| | | 09\|Protein | TSSDPLYKANLSNSTFHLVILRHNKDEKI | | | |
| | | Name: glycopr | VSMPSFNLSTDQEYVQIIPAEGGGTAESG | | | |
| | | otein\|Gene | NLYFPCIGRLLHKRVTHPLCKKSNCSRT | | | |
| | | Symbol: G | DDESCLKSYYNQGSPQHQVVNCLIRIRN | | | |
| | | | AQRDNPTWDVITVDLTNTYPGSRSRIFG | | | |
| | | | SFSKPMLYQSSVSWHTLLQVAEITDLDK | | | |
| | | | YQLDWLDTPYISRPGGSECPFGNYCPTV | | | |
| | | | CWEGTYNDVYSLTPNNDLFVTVYLKSE | | | |
| | | | QVAENPYFAIFSRDQILKEFPLDAWISSA | | | |
| | | | RTTTISCFMFNNEIWCIAALEITRLNDDII | | | |
| | | | RPIYYSFWLPTDCRTPYPHTGKMTRVPL | | | |
| | | | RSTYNY | | | |
| NC_02 | 8716- | gb: NC_02535 | MATNRDNTITSAEVSQEDKVKKYYGVE | 2 | 31 | 56 |
| 5352 | 11257 | 2: 8716- | TAEKVADSISGNKVFILMNTLLILTGAIIT | | | |
| | | 11257\|Organis | ITLNITNLTAAKSQQNMLKIIQDDVNAK | | | |
| | | m: Mojiang | LEMFVNLDQLVKGEIKPKVSLINTAVSV | | | |
| | | virus\|Strain | SIPGQISNLQTKFLQKYVYLEESITKQCT | | | |
| | | Name: Tonggu | CNPLSGIFPTSGPTYPPTDKPDDDTTDDD | | | |
| | | an1\|Protein | KVDTTIKPIEYPKPDGCNRTGDHFTMEP | | | |
| | | Name: attachm | GANFYTVPNLGPASSNSDECYTNPSFSIG | | | |
| | | ent | SSIYMFSQEIRKTDCTAGEILSIQIVLGRI | | | |
| | | glycoprotein\|G | VDKGQQGPQASPLLVWAVPNPKIINSCA | | | |
| | | ene Symbol: G | VAAGDEMGWVLCSVTLTAASGEPIPHM | | | |
| | | | FDGFWLYKLEPDTEVVSYRITGYAYLLD | | | |
| | | | KQYDSVFIGKGGGIQKGNDLYFQMYGL | | | |
| | | | SRNRQSFKALCEHGSCLGTGGGGYQVL | | | |
| | | | CDRAVMSFGSEESLITNAYLKVNDLASG | | | |
| | | | KPVIIGQTFPPSDSYKGSNGRMYTIGDKY | | | |
| | | | GLYLAPSSWNRYLRFGITPDISVRSTTWL | | | |
| | | | KSQDPIMKILSTCTNTDRDMCPEICNTRG | | | |
| | | | YQDIFPLSEDSEYYTYIGITPNNGGTKNF | | | |
| | | | VAVRDSDGHIASIDILQNYYSITSATISCF | | | |
| | | | MYKDEIWCIAITEGKKQKDNPQRIYAHS | | | |
| | | | YKIRQMCYNMKSATVTVGNAKNITIRR | | | |
| | | | Y | | | |

[0221] In some embodiments, the G protein has a sequence set forth in any of SEQ ID NOS: 9, 18, 28, 29, 30, 31, 44, 52, or 54-56 or is a functionally active variant or biologically active portion thereof that has a sequence that is at least at or about 80%, at least at or about 81%, at least at or about 82%, at least at or about 83%, at least at or about 84%, at least at or about 85%, at least at or about 86%, at least at or about 87%, at least at or about 88%, at least at or about 89%, at least at or about 90%, at least at or about 91%, at least at or about 92%, at least at or about 93%, at least at or about 94%, at least at or about 95%, at least at or about 96%, at least at or about 97%, at least at or about 98%, or at least at or about 99% identical to any one of SEQ ID NOS: 9, 18, 28, 29, 30, 31, 44, 52, or 54-56. In particular embodiments, the G protein or functionally active variant or biologically active portion is a protein that retains fusogenic activity in conjunction with a Henipavirus F protein, such as an F protein set forth in Section I.B (e.g. NiV-F or HeV-F). Fusogenic activity includes the activity of the G protein in conjunction with a Henipavirus F protein to promote or facilitate fusion of two membrane lumens, such as the lumen of the targeted lipid particle having embedded in its lipid bilayer a henipavirus F and G protein, and a cytoplasm of a target cell, e.g. a cell that contains a surface receptor or molecule that is recognized or bound by the targeted envelope protein. In some embodiments, the F protein and G protein are from the same Henipavirus species (e.g. NiV-G and NiV-F). In some embodiments, the F protein and G protein are from different Henipavirus species (e.g. NiV-G and HeV-F).

[0222] In particular embodiments, the G protein has the sequence of amino acids set forth in SEQ ID NO: 9, SEQ ID NO: 28, SEQ ID NO: 18, SEQ ID NO: 30, SEQ ID NO: 31, SEQ ID NO: 44, SEQ ID NO: 52 or SEQ ID NO: 54-56 or is a functionally active variant thereof or a biologically active portion thereof that retains fusogenic activity. In some embodiments, the functionally active variant comprises an amino acid sequence having at least at or about 80%, at least at or about 85%, at least at or about 90%, at least at or about 91%, at least at or about 92%, at least at or about 93%, at least at or about 94%, at least at or about 95%, at or about 96%, at least at or about 97%, at least at or about 98%, or at least at or about 99% sequence identity to SEQ ID NO:9, SEQ ID NO:28, SEQ ID NO: 18, SEQ ID NO:30, SEQ ID NO: 31, SEQ ID NO: 44, SEQ ID NO: 52 or SEQ ID NO: 54-56 and retains fusogenic activity in conjunction with a Henipavirus F protein (e.g., NiV-F or HeV-F). In some embodiments, the biologically active portion has an amino acid sequence having at least at or about 80%, at least at or about 85%, at least at or about 90%, at least at or about 91%, at least at or about 92%, at least at or about 93%, at least at or about 94%, at least at or about 95%, at or about 96%, at least at or about 97%, at least at or about 98%, or at least at or about 99% sequence identity to SEQ ID NO:9, SEQ ID NO:28, SEQ ID NO: 18, SEQ ID NO:30 SEQ ID NO: 31, SEQ ID NO: 44, SEQ ID NO: 52 or SEQ ID NO: 54-56 and retains fusogenic activity in conjunction with a Henipavirus F protein (e.g., NiV-F or HeV-F).

[0223] Reference to retaining fusogenic activity includes activity (in conjunction with a Henipavirus F protein) that is between at or about 10% and at or about 150% or more of the level or degree of binding of the corresponding wild-type G protein, such as set forth in SEQ ID NO:9, SEQ ID NO:28, SEQ ID NO: 18, SEQ ID NO:30, SEQ ID NO: 31, SEQ ID NO: 44, SEQ ID NO: 52 or SEQ ID NO: 54-56 such as at least or at least about 10% of the level or degree of fusogenic activity of the corresponding wild-type G protein, such as at least or at least about 15% of the level or degree of fusogenic activity of the corresponding wild-type G protein, such as at least or at least about 20% of the level or degree of fusogenic activity of the corresponding wild-type G protein, such as at least or at least about 25% of the level or degree of fusogenic activity of the corresponding wild-type G protein, such as at least or at least about 30% of the level or degree of fusogenic activity of the corresponding wild-type G protein, such as at least or at least about 35% of the level or degree of fusogenic activity of the corresponding wild-type G protein, such as at least or at least about 40% of the level or degree of fusogenic activity of the corresponding wild-type G protein, such as at least or at least about 45% of the level or degree of fusogenic activity of the corresponding wild-type G protein, such as at least or at least about 50% of the level or degree of fusogenic activity of the corresponding wild-type G protein, such as at least or at least about 55% of the level or degree of fusogenic activity of the corresponding wild-type G protein, such as at least or at least about 60% of the level or degree of fusogenic activity of the corresponding wild-type G protein, such as at least or at least about 65% of the level or degree of fusogenic activity of the corresponding wild-type G protein, such as at least or at least about 70% of the level or degree of fusogenic activity of the corresponding wild-type G protein, such as at least or at least about 75% of the level or degree of fusogenic activity of the corresponding wild-type G protein, such as at least or at least about 80% of the level or degree of fusogenic activity of the corresponding wild-type G protein, such as at least or at least about 85% of the level or degree of fusogenic activity of the corresponding wild-type G protein, such as at least or at least about 90% of the level or degree of fusogenic activity of the corresponding wild-type G protein, such as at least or at least about 95% of the level or degree of fusogenic activity of the corresponding wild-type G protein, such as at least or at least about 100% of the level or degree of fusogenic activity of the corresponding wild-type G protein, or such as at least or at least about 120% of the level or degree of fusogenic activity of the corresponding wild-type G protein.

[0224] In some embodiments the G protein is a mutant G protein that is a functionally active variant or biologically active portion containing one or more amino acid mutations, such as one or more amino acid insertions, deletions, substitutions or truncations. In some embodiments, the mutations described herein relate to amino acid insertions, deletions, substitutions or truncations of amino acids compared to a reference G protein sequence. In some embodiments, the reference G protein sequence is the wild-type sequence of a G protein or a biologically active portion thereof. In some embodiments, the functionally active variant or the biologically active portion thereof is a mutant of a wild-type Hendra (HeV) virus G protein, a wild-type Nipah (NiV) virus G-protein (NiV-G), a wild-type Cedar (CedPV) virus G-protein, a wild-type Mojiang virus G-protein, a wild-type bat Paramyxovirus G-protein or biologically active portion thereof. In some embodiments, the wild-type G protein has the sequence set forth in any one of SEQ ID NOS: 9, 18, 28, 29, 30, 31 SEQ ID NO: 44, SEQ ID NO: 52 or SEQ ID NO: 54-56.

[0225] In some embodiments, the G protein is a mutant G protein that is a biologically active portion that is an N-terminally and/or C-terminally truncated fragment of a wild-type Hendra (HeV) virus G protein, a wild-type Nipah (NiV) virus G-protein (NiV-G), a wild-type Cedar (CedPV) virus G-protein, a wild-type Mojiang virus G-protein, a wild-type bat Paramyxovirus G-protein. In particular embodiments, the truncation is an N-terminal truncation of all or a portion of the cytoplasmic domain. In some embodiments, the mutant G protein is a biologically active portion that is truncated and lacks up to 49 contiguous amino acid residues at or near the N-terminus of the wild-type G protein, such as a wild-type G protein set forth in any one of SEQ ID NOS: 9, 18, 28, 29, 30, 31, SEQ ID NO: 44, SEQ ID NO: 52 or SEQ ID NO: 54-56. In some embodiments, the mutant F protein is truncated and lacks up to 49 contiguous amino acids, such as up to 49, 48, 47, 46, 45, 44, 43, 42, 41, 40, 30, 38, 37, 36, 35, 34, 33, 32, 31, 30, 29, 28, 27, 26, 25, 24, 23, 22, 21, 20, 19, 18, 17, 16, 15, 14, 13, 12, 11, 10, 9, 8, 7, 6, 5, 4, 3, 2 or 1 contiguous amino acids at the N-terminus of the wild-type G protein.

[0226] In some embodiments, the G protein is a wild-type Nipah virus G (NiV-G) protein or a Hendra virus G protein, or is a functionally active variant or biologically active portion thereof. In some embodiments, the G protein is a NiV-G protein that has the sequence set forth in SEQ ID NO:9, SEQ ID NO:28 or SEQ ID NO:44, or is a functional variant or a biologically active portion thereof that has an amino acid sequence having at least at or about 80%, at least at or about 81%, at least at or about 82%, at least at or about 83%, at least at or about 84%, at least at or about 85%, at least at or about 86%, at least at or about 87%, at least at or about 88%, at least at or about 89%, at least at or about 90%, at least at or about 91%, at least at or about 92%, at least at or about 93%, at least at or about 94%, at least at or about 95%, at or about 96%, at least at or about 97%, at least at or about 98%, at least at or about 99% sequence identity to SEQ ID NO:9, SEQ ID NO:28 or SEQ ID NO:44.

[0227] In some embodiments, the G protein is a mutant NiV-G protein that is a biologically active portion of a wild-type NiV-G. In some embodiments, the biologically active portion is an N-terminally truncated fragment. In some embodiments, the mutant NiV-G protein is truncated and lacks up to 5 contiguous amino acid residues at or near the N-terminus of the wild-type NiV-G protein (SEQ ID NO:9, SEQ ID NO:28 or SEQ ID NO:44), up to 6 contiguous amino acid residues at or near the N-terminus of the wild-type NiV-G protein (SEQ ID NO:9, SEQ ID NO:28 or SEQ ID NO:44), up to 7 contiguous amino acid residues at or near the N-terminus of the wild-type NiV-G protein (SEQ ID NO:9, SEQ ID NO:28 or SEQ ID NO:44), up to 8 contiguous amino acid residues at or near the N-terminus of the wild-type NiV-G protein (SEQ ID NO:9, SEQ ID NO:28 or SEQ ID NO:44), up to 9 contiguous amino acid residues at or near the N-terminus of the wild-type NiV-G protein (SEQ ID NO:9, SEQ ID NO:28 or SEQ ID NO:44), up to 10 contiguous amino acid residues at or near the N-terminus of the wild-type NiV-G protein (SEQ ID NO:9, SEQ ID NO:28 or SEQ ID NO:44), up to 11 contiguous amino acid residues at or near the N-terminus of the wild-type NiV-G protein (SEQ ID NO:9, SEQ ID NO:28 or SEQ ID NO:44), up to 12 contiguous amino acid residues at or near the N-terminus of the wild-type NiV-G protein (SEQ ID NO:9, SEQ ID NO:28 or SEQ ID NO:44), up to 13 contiguous amino acid residues at or near the N-terminus of the wild-type NiV-G protein (SEQ ID NO:9, SEQ ID NO:28 or SEQ ID NO:44), up to 14 contiguous amino acid residues at or near the N-terminus of the wild-type NiV-G protein (SEQ ID NO:9, SEQ ID NO:28 or SEQ ID NO:44), up to 15 contiguous amino acid residues at or near the N-terminus of the wild-type NiV-G protein (SEQ ID NO:9, SEQ ID NO:28 or SEQ ID NO:44), up to 16 contiguous amino acid residues at or near the N-terminus of the wild-type NiV-G protein (SEQ ID NO:9, SEQ ID NO:28 or SEQ ID NO:44), up to 17 contiguous amino acid residues at or near the N-terminus of the wild-type NiV-G protein (SEQ ID NO:9, SEQ ID NO:28 or SEQ ID NO:44), up to 18 contiguous amino acid residues at or near the N-terminus of the wild-type NiV-G protein (SEQ ID NO:9, SEQ ID NO:28 or SEQ ID NO:44), up to 19 contiguous amino acid residues at or near the N-terminus of the wild-type NiV-G protein (SEQ ID NO:9, SEQ ID NO:28 or SEQ ID NO:44), up to 20 contiguous amino acid residues at or near the N-terminus of the wild-type NiV-G protein (SEQ ID NO:9, SEQ ID NO:28 or SEQ ID NO:44), up to 21 contiguous amino acid residues at or near the N-terminus of the wild-type NiV-G protein (SEQ ID NO:9, SEQ ID NO:28 or SEQ ID NO:44), up to 22 contiguous amino acid residues at or near the N-terminus of the wild-type NiV-G protein (SEQ ID NO:9, SEQ ID NO:28 or SEQ ID NO:44), up to 23 contiguous amino acid residues at or near the N-terminus of the wild-type NiV-G protein (SEQ ID NO:9, SEQ ID NO:28 or SEQ ID NO:44), up to 24 contiguous amino acid residues at or near the N-terminus of the wild-type NiV-G protein (SEQ ID NO:9, SEQ ID NO:28 or SEQ ID NO:44), up to 25 contiguous amino acid residues at or near the N-terminus of the wild-type NiV-G protein (SEQ ID NO:9, SEQ ID NO:28 or SEQ ID NO:44), up to 26 contiguous amino acid residues at or near the N-terminus of the wild-type NiV-G protein (SEQ ID NO:9, SEQ ID NO:28 or SEQ ID NO:44), up to 27 contiguous amino acid residues at or near the N-terminus of the wild-type NiV-G protein (SEQ ID NO:9, SEQ ID NO:28 or SEQ ID NO:44), up to 28 contiguous amino acid residues at or near the N-terminus of the wild-type NiV-G protein (SEQ ID NO:9, SEQ ID NO:28 or SEQ ID NO:44), up to 29 contiguous amino acid residues at or near the N-terminus of the wild-type NiV-G protein (SEQ ID NO:9, SEQ ID NO:28 or SEQ ID NO:44), up to 30 contiguous amino acid residues at or near the N-terminus of the wild-type NiV-G protein (SEQ ID NO:9, SEQ ID NO:28 or SEQ ID NO:44), up to 31 contiguous amino acid residues at or near the N-terminus of the wild-type NiV-G protein (SEQ ID NO:9, SEQ ID NO:28 or SEQ ID NO:44), up to 32 contiguous amino acid residues at or near the N-terminus of the wild-type NiV-G protein (SEQ ID NO:9, SEQ ID NO:28 or SEQ ID NO:44), up to 33 contiguous amino acid residues at or near the N-terminus of the wild-type NiV-G protein (SEQ ID NO:9, SEQ ID NO:28 or SEQ ID NO:44), up to 34 contiguous amino acid residues at or near the N-terminus of the wild-type NiV-G protein (SEQ ID NO:9, SEQ ID NO:28 or SEQ ID NO:44), up to 35 contiguous amino acid residues at or near the N-terminus of the wild-type NiV-G protein (SEQ ID NO:9, SEQ ID NO:28 or SEQ ID NO:44), up to 36 contiguous amino acid residues at or near the N-terminus of the wild-type NiV-G protein (SEQ ID NO:9, SEQ ID NO:28 or SEQ ID NO:44), up to 37 contiguous amino acid residues at or near the N-terminus of the wild-type NiV-G protein (SEQ ID NO:9, SEQ ID NO:28 or SEQ ID NO:44), up to 38 contiguous amino acid residues at or near the N-terminus of the wild-type NiV-G protein (SEQ ID NO:9, SEQ ID NO:28 or SEQ ID NO:44), up to 39 contiguous amino acid residues at or near the N-terminus of the wild-type NiV-G protein (SEQ ID NO:9, SEQ ID NO:28 or SEQ ID NO:44), up to 40 contiguous amino acid residues at or near the N-terminus of the wild-type NiV-G protein (SEQ ID NO:9, SEQ ID NO:28 or SEQ ID NO:44), up to 41 contiguous amino acid residues at or near the N-terminus of the wild-type NiV-G protein (SEQ ID NO:9, SEQ ID NO:28 or SEQ ID NO:44), up to 42 contiguous amino acid residues at or near the N-terminus of the wild-type NiV-G protein (SEQ ID NO:9, SEQ ID NO:28 or SEQ ID NO:44), up to 43 contiguous amino acid residues at or near the N-terminus of the wild-type NiV-G protein (SEQ ID NO:9, SEQ ID NO:28 or SEQ ID NO:44), up to 44 contiguous amino acid residues at or near the N-terminus of the wild-type NiV-G protein (SEQ ID NO:9, SEQ ID NO:28 or SEQ ID NO:44), or up to 45 contiguous amino acid residues at or near the N-terminus of the wild-type NiV-G protein (SEQ ID NO:9, SEQ ID NO:28 or SEQ ID NO:44).

[0228] In some embodiments, the NiV-G protein is a biologically active portion that does not contain a cytoplasmic domain. In some embodiments, the NiV-G protein without the cytoplasmic domain is encoded by SEQ ID NO: 32.

[0229] In some embodiments, the mutant NiV-G protein comprises a sequence set forth in any of SEQ ID NOS: 10-15, 35-40, 45-50, 22, 53 or SEQ ID NO: 32, or is a functional variant thereof that has an amino acid sequence having at least at or 80%, at least at or about 81%, at least at or about 82%, at least at or about 83%, at or about 84%, at least at or about 85%, at least at or about 86%, or at least at or about 87%, at least at or about 88%, or at least at or about 89%, about 90%, at least at or about 91%, at least at or about 92%, at least at or about 93%, at least at or about 94%, at least at or about 95%, at or about 96%, at least at or about 97%, at least at or about 98%, or at least at or about 99% sequence identity to SEQ ID NOs: 10-15, 35-40, 45-50, 22, 53 or SEQ ID NO:32.

[0230] In some embodiments, the mutant NiV-G protein has a 5 amino acid truncation at or near the N-terminus of the wild-type NiV-G protein (SEQ ID NO:9, SEQ ID NO:28 or SEQ ID NO:44), such as set forth in SEQ ID NO: 10 or a functional variant thereof having at least at or about 80%, at least at or about 81%, at least at or about 82%, at least at or about 83%, at or about 84%, at least at or about 85%, at least at or about 86%, or at least at or about 87%, at least at or about 88%, or at least at or about 89%, at least at or about 90%, at least at or about 91%, at least at or about 92%, at least at or about 93%, at least at or about 94%, at least at or about 95%, at or about 96%, at least at or about 97%, at least at or about 98%, or at least at or about 99% sequence identity to SEQ ID NO:10 or such as set forth in SEQ ID NO: 35 or a functional variant thereof having at least at or about 80%, at least at or about 81%, at least at or about 82%, at least at or about 83%, at or about 84%, at least at or about 85%, at least at or about 86%, or at least at or about 87%, at least at or about 88%, or at least at or about 89%, at least at or about 90%, at least at or about 91%, at least at or about 92%, at least at or about 93%, at least at or about 94%, at least at or about 95%, at or about 96%, at least at or about 97%, at least at or about 98%, or at least at or about 99% sequence identity to SEQ ID NO:35 or such as set forth in SEQ ID NO: 45 or a functional variant thereof having at least at or about 80%, at least at or about 81%, at least at or about 82%, at least at or about 83%, at or about 84%, at least at or about 85%, at least at or about 86%, or at least at or about 87%, at least at or about 88%, or at least at or about 89%, at least at or about 90%, at least at or about 91%, at least at or about 92%, at least at or about 93%, at least at or about 94%, at least at or about 95%, at or about 96%, at least at or about 97%, at least at or about 98%, or at least at or about 99% sequence identity to SEQ ID NO:45. In some embodiments, the mutant NiV-G protein has a 10 amino acid truncation at or near the N-terminus of the wild-type NiV-G protein (SEQ ID NO:9, SEQ ID NO:28 or SEQ ID NO:44), such as set forth in SEQ ID NO: 11 or a functional variant thereof having at least at or about 80%, at least at or about 81%, at least at or about 82%, at least at or about 83%, at or about 84%, at least at or about 85%, at least at or about 86%, or at least at or about 87%, at least at or about 88%, or at least at or about 89%, at least at or about 90%, at least at or about 91%, at least at or about 92%, at least at or about 93%, at least at or about 94%, at least at or about 95%, at or about 96%, at least at or about 97%, at least at or about 98%, or at least at or about 99% sequence identity to SEQ ID NO:11, or such as set forth in SEQ ID NO: 36 or a functional variant thereof having at least at or about 80%, at least at or about 81%, at least at or about 82%, at least at or about 83%, at or about 84%, at least at or about 85%, at least at or about 86%, or at least at or about 87%, at least at or about 88%, or at least at or about 89%, at least at or about 90%, at least at or about 91%, at least at or about 92%, at least at or about 93%, at least at or about 94%, at least at or about 95%, at or about 96%, at least at or about 97%, at least at or about 98%, or at least at or about 99% sequence identity to SEQ ID NO:36 or such as set forth in SEQ ID NO: 46 or a functional variant thereof having at least at or about 80%, at least at or about 81%, at least at or about 82%, at least at or about 83%, at or about 84%, at least at or about 85%, at least at or about 86%, or at least at or about 87%, at least at or about 88%, or at least at or about 89%, at least at or about 90%, at least at or about 91%, at least at or about 92%, at least at or about 93%, at least at or about 94%, at least at or about 95%, at or about 96%, at least at or about 97%, at least at or about 98%, or at least at or about 99% sequence identity to SEQ ID NO:46.

[0231] In some embodiments, the mutant NiV-G protein has a 15 amino acid truncation at or near the N-terminus of the wild-type NiV-G protein (SEQ ID NO:9, SEQ ID NO:28 or SEQ ID NO:44), such as set forth in SEQ ID NO: 12 or a functional variant thereof that has an amino acid sequence having at least at or about 80%, at least at or about 81%, at least at or about 82%, at least at or about 83%, at or about 84%, at least at or about 85%, at least at or about 86%, or at least at or about 87%, at least at or about 88%, or at least at or about 89%, at least at or about 90%, at least at or about 91%, at least at or about 92%, at least at or about 93%, at least at or about 94%, at least at or about 95%, at or about 96%, at least at or about 97%, at least at or about 98%, or at least at or about 99% sequence identity to SEQ ID NO:12 or such as set forth in SEQ ID NO: 37 or a functional variant thereof having at least at or about 80%, at least at or about 81%, at least at or about 82%, at least at or about 83%, at or about 84%, at least at or about 85%, at least at or about 86%, or at least at or about 87%, at least at or about 88%, or at least at or about 89%, at least at or about 90%, at least at or about 91%, at least at or about 92%, at least at or about 93%, at least at or about 94%, at least at or about 95%, at or about 96%, at least at or about 97%, at least at or about 98%, or at least at or about 99% sequence identity to SEQ ID NO:37 or such as set forth in SEQ ID NO: 47 or a functional variant thereof having at least at or about 80%, at least at or about 81%, at least at or about 82%, at least at or about 83%, at or about 84%, at least at or about 85%, at least at or about 86%, or at least at or about 87%, at least at or about 88%, or at least at or about 89%, at least at or about 90%, at least at or about 91%, at least at or about 92%, at least at or about 93%, at least at or about 94%, at least at or about 95%, at or about 96%, at least at or about 97%, at least at or about 98%, or at least at or about 99% sequence identity to SEQ ID NO:47. In some embodiments, the mutant NiV-G protein has a 20 amino acid truncation at or near the N-terminus of the wild-type NiV-G protein (SEQ ID NO:9, SEQ ID NO:28 or SEQ ID NO:44) such as set forth in SEQ ID NO: 13, or a functional variant thereof having at least at or about 80%, at least at or about 81%, at least at or about 82%, at least at or about 83%, at or about 84%, at least at or about 85%, at least at or about 86%, or at least at or about 87%, at least at or about 88%, or at least at or about 89%, at least at or about 90%, at least at or about 91%, at least at or about 92%, at least at or about 93%, at least at or about 94%, at least at or about 95%, at or about 96%, at least at or about 97%, at least at or about 98%, or at least at or about 99% sequence identity to SEQ ID NO:13 or such as set forth in SEQ ID NO: 38 or a functional variant thereof having at least at or about 80%, at least at or about 81%, at least at or about 82%, at least at or about 83%, at or about 84%, at least at or about 85%, at least at or about 86%, or at least at or about 87%, at least at or about 88%, or at least at or about 89%, at least at or about 90%, at least at or about 91%, at least at or about 92%, at least at or about 93%, at least at or about 94%, at least at or about 95%, at or about 96%, at least at or about 97%, at least at or about 98%, or at least at or about 99% sequence identity to SEQ ID NO:38 or such as set forth in SEQ ID NO: 48 or a functional variant thereof having at least at or about 80%, at least at or about 81%, at least at or about 82%, at least at or about 83%, at or about 84%, at least at or about 85%, at least at or about 86%, or at least at or about 87%, at least at or about 88%, or at least at or about 89%, at least at or about 90%, at least at or about 91%, at least at or about 92%, at least at or about 93%, at least at or about 94%, at least at or about 95%, at or about 96%, at least at or about 97%, at least at or about 98%, or at least at or about 99% sequence identity to SEQ ID NO:48. In some embodiments, the mutant NiV-G protein has a 25 amino acid truncation at or near the N-terminus of the wild-type NiV-G protein (SEQ ID NO:9, SEQ ID NO:28 or SEQ ID NO:44), such as set forth in SEQ ID NO: 14 or a functional variant thereof having at least at or about 80%, at least at or about 81%, at least at or about 82%, at least at or about 83%, at or about 84%, at least at or about 85%, at least at or about 86%, or at least at or about 87%, at least at or about 88%, or at least at or about 89%, at least at or about 90%, at least at or about 91%, at least at or about 92%, at least at or about 93%, at least at or about 94%, at least at or about 95%, at or about 96%, at least at or about 97%, at least at or about 98%, or at least at or about 99% sequence identity to SEQ ID NO:14 or such as set forth in SEQ ID NO: 39 or a functional variant thereof having at least at or about 80%, at least at or about 81%, at least at or about 82%, at least at or about 83%, at or about 84%, at least at or about 85%, at least at or about 86%, or at least at or about 87%, at least at or about 88%, or at least at or about 89%, at least at or about 90%, at least at or about 91%, at least at or about 92%, at least at or about 93%, at least at or about 94%, at least at or about 95%, at or about 96%, at least at or about 97%, at least at or about 98%, or at least at or about 99% sequence identity to SEQ ID NO:39 or such as set forth in SEQ ID NO: 49 or a functional variant thereof having at least at or about 80%, at least at or about 81%, at least at or about 82%, at least at or about 83%, at or about 84%, at least at or about 85%, at least at or about 86%, or at least at or about 87%, at least at or about 88%, or at least at or about 89%, at least at or about 90%, at least at or about 91%, at least at or about 92%, at least at or about 93%, at least at or about 94%, at least at or about 95%, at or about 96%, at least at or about 97%, at least at or about 98%, or at least at or about 99% sequence identity to SEQ ID NO:49. In some embodiments, the mutant NiV-G protein has a 30 amino acid truncation at or near the N-terminus of the wild-type NiV-G protein (SEQ ID NO:9, SEQ ID NO:28 or SEQ ID NO:44), such as set forth in SEQ ID NO: 15 or a functional variant thereof having at least at or about 80%, at least at or about 81%, at least at or about 82%, at least at or about 83%, at or about 84%, at least at or about 85%, at least at or about 86%, or at least at or about 87%, at least at or about 88%, or at least at or about 89%, at least at or about 90%, at least at or about 91%, at least at or about 92%, at least at or about 93%, at least at or about 94%, at least at or about 95%, at or about 96%, at least at or about 97%, at least at or about 98%, or at least at or about 99% sequence identity to SEQ ID NO:15 or such as set forth in SEQ ID NO: 40 or a functional variant thereof having at least at or about 80%, at least at or about 81%, at least at or about 82%, at least at or about 83%, at or about 84%, at least at or about 85%, at least at or about 86%, or at least at or about 87%, at least at or about 88%, or at least at or about 89%, at least at or about 90%, at least at or about 91%, at least at or about 92%, at least at or about 93%, at least at or about 94%, at least at or about 95%, at or about 96%, at least at or about 97%, at least at or about 98%, or at least at or about 99% sequence identity to SEQ ID NO:40, or such as set forth in SEQ ID NO: 50 or a functional variant thereof having at least at or about 80%, at least at or about 81%, at least at or about 82%, at least at or about 83%, at or about 84%, at least at or about 85%, at least at or about 86%, or at least at or about 87%, at least at or about 88%, or at least at or about 89%, at least at or about 90%, at least at or about 91%, at least at or about 92%, at least at or about 93%, at least at or about 94%, at least at or about 95%, at or about 96%, at least at or about 97%, at least at or about 98%, or at least at or about 99% sequence identity to SEQ ID NO:50. In some embodiments, the mutant NiV-G protein has a 34 amino acid truncation at or near the N-terminus of the wild-type NiV-G protein (SEQ ID NO:9, SEQ ID NO:28 or SEQ ID NO:44), such as set forth in SEQ ID NO: 22 or a functional variant thereof having at least at or about 80%, at least at or about 81%, at least at or about 82%, at least at or about 83%, at or about 84%, at least at or about 85%, at least at or about 86%, or at least at or about 87%, at least at or about 88%, or at least at or about 89%, at least at or about 90%, at least at or about 91%, at least at or about 92%, at least at or about 93%, at least at or about 94%, at least at or about 95%, at or about 96%, at least at or about 97%, at least at or about 98%, or at least at or about 99% sequence identity to SEQ ID NO:22 or such as set forth in SEQ ID NO: 53 or a functional variant thereof having at least at or about 80%, at least at or about 81%, at least at or about 82%, at least at or about 83%, at or about 84%, at least at or about 85%, at least at or about 86%, or at least at or about 87%, at least at or about 88%, or at least at or about 89%, at least at or about 90%, at least at or about 91%, at least at or about 92%, at least at or about 93%, at least at or about 94%, at least at or about 95%, at or about 96%, at least at or about 97%, at least at or about 98%, or at least at or about 99% sequence identity to SEQ ID NO:53. In some embodiments, the mutant NiV-G protein lacks the N-terminal cytoplasmic domain of the wild-type NiV-G protein (SEQ ID NO:9, SEQ ID NO:28 or SEQ ID NO:44), such as set forth in SEQ ID NO:32 or a functional variant thereof having at least at or about 80%, at least at or about 81%, at least at or about 82%, at least at or about 83%, at or about 84%, at least at or about 85%, at least at or about 86%, or at least at or about 87%, at least at or about 88%, or at least at or about 89%, at least at or about 90%, at least at or about 91%, at least at or about 92%, at least at or about 93%, at least at or about 94%, at least at or about 95%, at or about 96%, at least at or about 97%, at least at or about 98%, or at least at or about 99% sequence identity to SEQ ID NO:32.

[0232] In some embodiments, the mutant G protein is a mutant HeV-G protein that has the sequence set forth in SEQ ID NO:18 or 52, or is a functional variant or biologically active portion thereof that has an amino acid sequence having at least at or about 80%, at least at or about 81%, at least at or about 82%, at least at or about 83%, at least at or about 84%, at or about 85%, at least at or about 86%, at least at or about 87%, at or about 88%, at least at or about 89%, at least at or about 90%, at least at or about 91%, at least at or about 92%, at least at or about 93%, at least at or about 94%, at least at or about 95%, at or about 96%, at least at or about 97%, at least at or about 98%, or at least at or about 99% sequence identity to SEQ ID NO:18 or 52.

[0233] In some embodiments, the G protein is a mutant HeV-G protein that is a biologically active portion of a wild-type HeV-G. In some embodiments, the biologically active portion is an N-terminally truncated fragment. In some embodiments, the mutant HeV-G protein is truncated and lacks up to 5 contiguous amino acid residues at or near the N-terminus of the wild-type HeV-G protein (SEQ ID NO:18 or 52), up to 6 contiguous amino acid residues at or near the N-terminus of the wild-type HeV-G protein (SEQ ID NO:18 or 52), up to 7 contiguous amino acid residues at or near the N-terminus of the wild-type HeV-G protein (SEQ ID NO:18 or 52), up to 8 contiguous amino acid residues at or near the N-terminus of the wild-type HeV-G protein (SEQ ID NO:18 or 52), up to 9 contiguous amino acid residues at or near the N-terminus of the wild-type HeV-G protein (SEQ ID NO:18 or 52), up to 10 contiguous amino acid residues at or near the N-terminus of the wild-type HeV-G protein (SEQ ID NO:18 or 52), up to 11 contiguous amino acid residues at or near the N-terminus of the wild-type HeV-G protein (SEQ ID NO:18 or 52), up to 12 contiguous amino acid residues at or near the N-terminus of the wild-type HeV-G protein (SEQ ID NO:18 or 52), up to 13 contiguous amino acid residues at or near the N-terminus of the wild-type HeV-G protein (SEQ ID NO:18 or 52), up to 14 contiguous amino acid residues at or near the N-terminus of the wild-type HeV-G protein (SEQ ID NO:18 or 52), up to 15 contiguous amino acid residues at or near the N-terminus of the wild-type HeV-G protein (SEQ ID NO:18 or 52), up to 16 contiguous amino acid residues at or near the N-terminus of the wild-type HeV-G protein (SEQ ID NO:18 or 52), up to 17 contiguous amino acid residues at or near the N-terminus of the wild-type HeV-G protein (SEQ ID NO:18 or 52), up to 18 contiguous amino acid residues at or near the N-terminus of the wild-type HeV-G protein (SEQ ID NO:18 or 52), up to 19 contiguous amino acid residues at or near the N-terminus of the wild-type HeV-G protein (SEQ ID NO:18 or 52), up to 20 contiguous amino acid residues at or near the N-terminus of the wild-type HeV-G protein (SEQ ID NO:18 or 52), up to 21 contiguous amino acid residues at or near the N-terminus of the wild-type HeV-G protein (SEQ ID NO:18 or 52), up to 22 contiguous amino acid residues at or near the N-terminus of the wild-type HeV-G protein (SEQ ID NO:18 or 52), up to 23 contiguous amino acid residues at or near the N-terminus of the wild-type HeV-G protein (SEQ ID NO:18 or 52), up to 24 contiguous amino acid residues at or near the N-terminus of the wild-type HeV-G protein (SEQ ID NO:18 or 52), up to 25 contiguous amino acid residues at or near the N-terminus of the wild-type HeV-G protein (SEQ ID NO:18 or 52), up to 26 contiguous amino acid residues at or near the N-terminus of the wild-type HeV-G protein (SEQ ID NO:18 or 52), up to 27 contiguous amino acid residues at or near the N-terminus of the wild-type HeV-G protein (SEQ ID NO:18 or 52), up to 28 contiguous amino acid residues at or near the N-terminus of the wild-type HeV-G protein (SEQ ID NO:18 or 52), up to 29 contiguous amino acid residues at or near the N-terminus of the wild-type HeV-G protein (SEQ ID NO:18 or 52), up to 30 contiguous amino acid residues at or near the N-terminus of the wild-type HeV-G protein (SEQ ID NO:18 or 52), up to 31 contiguous amino acid residues at or near the N-terminus of the wild-type HeV-G protein (SEQ ID NO:18 or 52), up to 32 contiguous amino acid residues at or near the N-terminus of the wild-type HeV-G protein (SEQ ID NO:18 or 52), up to 33 contiguous amino acid residues at or near the N-terminus of the wild-type HeV-G protein (SEQ ID NO:18 or 52), up to 34 contiguous amino acid residues at or near the N-terminus of the wild-type HeV-G protein (SEQ ID NO:18 or 52), up to 35 contiguous amino acid residues at or near the N-terminus of the wild-type HeV-G protein (SEQ ID NO:18 or 52), up to 36 contiguous amino acid residues at or near the N-terminus of the wild-type HeV-G protein (SEQ ID NO:18 or 52), up to 37 contiguous amino acid residues at or near the N-terminus of the wild-type HeV-G protein (SEQ ID NO:18 or 52), up to 38 contiguous amino acid residues at or near the N-terminus of the wild-type HeV-G protein (SEQ ID NO:18 or 52), up to 39 contiguous amino acid residues at or near the N-terminus of the wild-type HeV-G protein (SEQ ID NO:18 or 52), up to 40 contiguous amino acid residues at or near the N-terminus of the wild-type HeV-G protein (SEQ ID NO:18 or 52), up to 41 contiguous amino acid residues at or near the N-terminus of the wild-type HeV-G protein (SEQ ID NO:18 or 52), up to 42 contiguous amino acid residues at or near the N-terminus of the wild-type HeV-G protein (SEQ ID NO:18 or 52), up to 43 contiguous amino acid residues at or near the N-terminus of the wild-type HeV-G protein (SEQ ID NO:18 or 52), up to 44 contiguous amino acid residues at or near the N-terminus of the wild-type HeV-G protein (SEQ ID NO:18 or 52), or up to 45 contiguous amino acid residues at or near the N-terminus of the wild-type HeV-G protein (SEQ ID NO:18 or 52). In some embodiments, the HeV-G protein is a biologically active portion that does not contain a cytoplasmic domain. In some embodiments, the mutant HeV-G protein lacks the N-terminal cytoplasmic domain of the wild-type HeV-G protein (SEQ ID NO:18 or 52), such as set forth in SEQ ID NO:33 or a functional variant thereof having at least at or about 80%, at least at or about 81%, at least at or about 82%, at least at or about 83%, at or about 84%, at least at or about 85%, at least at or about 86%, or at least at or about 87%, at least at or about 88%, or at least at or about 89%, at least at or about 90%, at least at or about 91%, at least at or about 92%, at least at or about 93%, at least at or about 94%, at least at or about 95%, at or about 96%, at least at or about 97%, at least at or about 98%, or at least at or about 99% sequence identity to SEQ ID NO:33.

[0234] In some embodiments, the G protein or the functionally active variant or biologically active portion thereof binds to Ephrin B2 or Ephrin B3. In some aspects, the G protein has the sequence of amino acids set forth in any one of SEQ ID NO:9, SEQ ID NO:18 or SEQ ID NO:28, SEQ ID NO:29, SEQ ID NO: 44, SEQ ID NO:30 or SEQ ID NO:31, or is a functionally active variant thereof or a biologically active portion thereof that is able to bind to Ephrin B2 or Ephrin B3. In some embodiments, the functionally active variant or biologically active portion has an amino acid sequence having at least about 80%, at least about 85%, at least at or about 90%, at least at or about 91%, at least at or about 92%, at least at or about 93%, at least at or about 94%, at least at or about 95%, at or about 96%, at least at or about 97%, at least at or about 98%, or at least at or about 99% sequence identity to SEQ ID NO:9, SEQ ID NO:18 or SEQ ID NO:28, SEQ ID NO:29, SEQ ID NO: 44, SEQ ID NO:30 or SEQ ID NO:31, or a functionally active variant or biologically active portion thereof, and retains binding to Ephrhin B2 or B3. Reference to retaining binding to Ephrin B2 or B3 includes binding that is at least or at least about 5% of the level or degree of binding of the corresponding wild-type G protein, such as set forth in SEQ ID NO:9, SEQ ID NO:18 or SEQ ID NO:28, SEQ ID NO:29, SEQ ID NO: 44, SEQ ID NO:30 or SEQ ID NO:31, or a functionally active variant or biologically active portion thereof, 10% of the level or degree of binding of the corresponding wild-type G protein, such as set forth in SEQ ID NO:9, SEQ ID NO:18 or SEQ ID NO:28, SEQ ID NO:29, SEQ ID NO: 44, SEQ ID NO:30 or SEQ ID NO:31, or a functionally active variant or biologically active portion thereof, 15% of the level or degree of binding of the corresponding wild-type G protein, such as set forth in SEQ ID NO:9, SEQ ID NO:18 or SEQ ID NO:28, SEQ ID NO:29, SEQ ID NO: 44, SEQ ID NO:30 or SEQ ID NO:31, or a functionally active variant or biologically active portion thereof, 20% of the level or degree of binding of the corresponding wild-type G protein, such as set forth in SEQ ID NO:9, SEQ ID NO:18 or SEQ ID NO:28, SEQ ID NO:29, SEQ ID NO: 44, SEQ ID NO:30 or SEQ ID NO:31, or a functionally active variant or biologically active portion thereof, 25% of the level or degree of binding of the corresponding wild-type G protein, such as set forth in SEQ ID NO:9, SEQ ID NO:18 or SEQ ID NO:28, SEQ ID NO:29, SEQ ID NO: 44, SEQ ID NO:30 or SEQ ID NO:31, or a functionally active variant or biologically active portion, 30% of the level or degree of binding of the corresponding wild-type G protein, such as set forth in SEQ ID NO:9, SEQ ID NO:18 or SEQ ID NO:28, SEQ ID NO:29, SEQ ID NO: 44, SEQ ID NO:30 or SEQ ID NO:31, or a functionally active variant or biologically active portion thereof, 35% of the level or degree of binding of the corresponding wild-type G protein, such as set forth in SEQ ID NO:9, SEQ ID NO:18 or SEQ ID NO:28, SEQ ID NO:29, SEQ ID NO: 44, SEQ ID NO:30 or SEQ ID NO:31, or a functionally active variant or biologically active portion thereof, 40% of the level or degree of binding of the corresponding wild-type G protein, such as set forth in SEQ ID NO:9, SEQ ID NO:18 or SEQ ID NO:28, SEQ ID NO:29, SEQ ID NO: 44, SEQ ID NO:30 or SEQ ID NO:31, or a functionally active variant or biologically active portion thereof, 45% of the level or degree of binding of the corresponding wild-type G protein, such as set forth in SEQ ID NO:9, SEQ ID NO:18 or SEQ ID NO:28, SEQ ID NO:29, SEQ ID NO: 44, SEQ ID NO:30 or SEQ ID NO:31, or a functionally active variant or biologically active portion thereof, 50% of the level or degree of binding of the corresponding wild-type G protein, such as set forth in SEQ ID NO:9, SEQ ID NO:18 or SEQ ID NO:28, SEQ ID NO:29, SEQ ID NO: 44, SEQ ID NO:30 or SEQ ID NO:31, or a functionally active variant or biologically active portion thereof, 55% of the level or degree of binding of the corresponding wild-type G protein, such as set forth in SEQ ID NO:9, SEQ ID NO:18 or SEQ ID NO:28, SEQ ID NO:29, SEQ ID NO: 44, SEQ ID NO:30 or SEQ ID NO:31, or a functionally active variant or biologically active portion thereof, 60% of the level or degree of binding of the corresponding wild-type G protein, such as set forth in SEQ ID NO:9, SEQ ID NO:18 or SEQ ID NO:28, SEQ ID NO:29, SEQ ID NO: 44, SEQ ID NO:30 or SEQ ID NO:31, or a functionally active variant or biologically active portion thereof, 65% of the level or degree of binding of the corresponding wild-type G protein, such as set forth in SEQ ID NO:9, SEQ ID NO:18 or SEQ ID NO:28, SEQ ID NO:29, SEQ ID NO: 44, SEQ ID NO:30 or SEQ ID NO:31, or a functionally active variant or biologically active portion thereof, 70% of the level or degree of binding of the corresponding wild-type G protein, such as set forth in SEQ ID NO:9, SEQ ID NO:18 or SEQ ID NO:28, SEQ ID NO:29, SEQ ID NO: 44, SEQ ID NO:30 or SEQ ID NO:31, or a functionally active variant or biologically active portion thereof, such as at least or at least about 75% of the level or degree of binding of the corresponding wild-type G protein, such as set forth in SEQ ID NO:9, SEQ ID NO:18 or SEQ ID NO:28, SEQ ID NO:29, SEQ ID NO: 44, SEQ ID NO:30 or SEQ ID NO:31, or a functionally active variant or biologically active portion thereof, such as at least or at least about 80% of the level or degree of binding of the corresponding wild-type G protein, such as set forth in SEQ ID NO:9, SEQ ID NO:18 or SEQ ID NO:28, SEQ ID NO:29, SEQ ID NO: 44, SEQ ID NO:30 or SEQ ID NO:31, or a functionally active variant or biologically active portion thereof, such as at least or at least about 85% of the level or degree of binding of the corresponding wild-type G protein, such as set forth in SEQ ID NO:9, SEQ ID NO:18 or SEQ ID NO:28, SEQ ID NO:29, SEQ ID NO: 44, SEQ ID NO:30 or SEQ ID NO:31, or a functionally active variant or biologically active portion thereof, such as at least or at least about 90% of the level or degree of binding of the corresponding wild-type G protein, such as set forth in SEQ ID NO:9, SEQ ID NO:18 or SEQ ID NO:28, SEQ ID NO:29, SEQ ID NO: 44, SEQ ID NO:30 or SEQ ID NO:31, or a functionally active variant or biologically active portion thereof, or such as at least or at least about 95% of the level or degree of binding of the corresponding wild-type protein, such as set forth in SEQ ID NO:9, SEQ ID NO:18 or SEQ ID NO:28, SEQ ID NO:29, SEQ ID NO: 44, SEQ ID NO:30 or SEQ ID NO:31, or a functionally active variant or biologically active portion thereof. In some embodiments, the G protein is NiV-G or a functionally active variant or biologically active portion thereof and binds to Ephrin B2 or Ephrin B3. In some aspects, the NiV-G has the sequence of amino acids set forth in SEQ ID NO:9, SEQ ID NO:28 or SEQ ID NO:44, or is a functionally active variant thereof or a biologically active portion thereof that is able to bind to Ephrin B2 or Ephrin B3. In some embodiments, the functionally active variant or biologically active portion has an amino acid sequence having at least about 80%, at least about 85%, at least at or about 90%, at least at or about 91%, at least at or about 92%, at least at or about 93%, at least at or about 94%, at least at or about 95%, at or about 96%, at least at or about 97%, at least at or about 98%, or at least at or about 99% sequence identity to SEQ ID NO:9, SEQ ID NO:28 or SEQ ID NO:44 and retains binding to Eprhin B2 or B3. Exemplary biologically active portions include N-terminally truncated variants lacking all or a portion of the cytoplasmic domain, e.g. 1 or more, such as 1 to 49 contiguous N-terminal amino acid residues, e.g. set forth in any one of SEQ ID NOS: 10-15, 35-40, 45-50 and 32. Reference to retaining binding to Ephrin B2 or B3 includes binding that is at least or at least about 5% of the level or degree of binding of the corresponding wild-type NiV-G, such as set forth in SEQ ID NO:9, SEQ ID NO:28 or SEQ ID NO:44, 10% of the level or degree of binding of the corresponding wild-type NiV-G, such as set forth in SEQ ID NO:9, SEQ ID NO:28 or SEQ ID NO:44, 15% of the level or degree of binding of the corresponding wild-type NiV-G, such as set forth in SEQ ID NO:9, SEQ ID NO:28 or SEQ ID NO:44, 20% of the level or degree of binding of the corresponding wild-type NiV-G, such as set forth in SEQ ID NO:9, SEQ ID NO:28 or SEQ ID NO:44, 25% of the level or degree of binding of the corresponding wild-type NiV-G, such as set forth in SEQ ID NO:9, SEQ ID NO:28 or SEQ ID NO:44, 30% of the level or degree of binding of the corresponding wild-type NiV-G, such as set forth in SEQ ID NO:9, SEQ ID NO:28 or SEQ ID NO:44, 35% of the level or degree of binding of the corresponding wild-type NiV-G, such as set forth in SEQ ID NO:9, SEQ ID NO:28 or SEQ ID NO:44, 40% of the level or degree of binding of the corresponding wild-type NiV-G, such as set forth in SEQ ID NO:9, SEQ ID NO:28 or SEQ ID NO:44, 45% of the level or degree of binding of the corresponding wild-type NiV-G, such as set forth in SEQ ID NO:9, SEQ ID NO:28 or SEQ ID NO:44, 50% of the level or degree of binding of the corresponding wild-type NiV-G, such as set forth in SEQ ID NO:9, SEQ ID NO:28 or SEQ ID NO:44, 55% of the level or degree of binding of the corresponding wild-type NiV-G, such as set forth in SEQ ID NO:9, SEQ ID NO:28 or SEQ ID NO:44, 60% of the level or degree of binding of the corresponding wild-type NiV-G, such as set forth in SEQ ID NO:9, SEQ ID NO:28 or SEQ ID NO:44, 65% of the level or degree of binding of the corresponding wild-type NiV-G, such as set forth in SEQ ID NO:9, SEQ ID NO:28 or SEQ ID NO:44, 70% of the level or degree of binding of the corresponding wild-type NiV-G, such as set forth in SEQ ID NO:9, SEQ ID NO:28 or SEQ ID NO:44, such as at least or at least about 75% of the level or degree of binding of the corresponding wild-type NiV-G, such as set forth in SEQ ID NO:9, SEQ ID NO:28 or SEQ ID NO:44, such as at least or at least about 80% of the level or degree of binding of the corresponding wild-type NIV-G, such as set forth in SEQ ID NO:9, SEQ ID NO:28 or SEQ ID NO:44, such as at least or at least about 85% of the level or degree of binding of the corresponding wild-type NiV-G, such as set forth in SEQ ID NO:9, SEQ ID NO:28 or SEQ ID NO:44, such as at least or at least about 90% of the level or degree of binding of the corresponding wild-type NiV-G, such as set forth in SEQ ID NO:9, SEQ ID NO:28 or SEQ ID NO:44, or such as at least or at least about 95% of the level or degree of binding of the corresponding wild-type NiV-G, such as set forth in SEQ ID NO:9, SEQ ID NO:28 or SEQ ID NO:44.

[0235] In some embodiments, the G protein is HeV-G or a functionally active variant or biologically active portion thereof and binds to Ephrin B2 or Ephrin B3. In some aspects, the HeV-G has the sequence of amino acids set forth in SEQ ID NO:18 or 52, or is a functionally active variant thereof or a biologically active portion thereof that is able to bind to Ephrin B2 or Ephrin B3. In some embodiments, the functionally active variant or biologically active portion has an amino acid sequence having at least about 80%, at least about 85%, at least at or about 90%, at least at or about 91%, at least at or about 92%, at least at or about 93%, at least at or about 94%, at least at or about 95%, at or about 96%, at least at or about 97%, at least at or about 98%, or at least at or about 99% sequence identity to SEQ ID NO:18 or 52 and retains binding to Eprhin B2 or B3. Exemplary biologically active portions include N-terminally truncated variants lacking all or a portion of the cytoplasmic domain, e.g. 1 or more, such as 1 to 49 contiguous N-terminal amino acid residues, e.g. set forth in any one of SEQ ID NO:33. Reference to retaining binding to Ephrin B2 or B3 includes binding that is at least or at least about 5% of the level or degree of binding of the corresponding wild-type HeV-G, such as set forth in SEQ ID NO:18 or 52, 10% of the level or degree of binding of the corresponding wild-type HeV-G, such as set forth in SEQ ID NO:18 or 52, 15% of the level or degree of binding of the corresponding wild-type HeV-G, such as set forth in SEQ ID NO:18 or 52, 20% of the level or degree of binding of the corresponding wild-type HeV-G, such as set forth in SEQ ID NO:18 or 52, 25% of the level or degree of binding of the corresponding wild-type HeV-G, such as set forth in SEQ ID NO:18 or 52, 30% of the level or degree of binding of the corresponding wild-type HeV-G, such as set forth in SEQ ID NO:18 or 52, 35% of the level or degree of binding of the corresponding wild-type HeV-G, such as set forth in SEQ ID NO:18 or 52, 40% of the level or degree of binding of the corresponding wild-type HeV-G, such as set forth in SEQ ID NO:18 or 52, 45% of the level or degree of binding of the corresponding wild-type HeV-G, such as set forth in SEQ ID NO:18 or 52, 50% of the level or degree of binding of the corresponding wild-type HeV-G, such as set forth in SEQ ID NO:18 or 52, 55% of the level or degree of binding of the corresponding wild-type HeV-G, such as set forth in SEQ ID NO:18 or 52, 60% of the level or degree of binding of the corresponding wild-type HeV-G, such as set forth in SEQ ID NO:18 or 52, 65% of the level or degree of binding of the corresponding wild-type HeV-G, such as set forth in SEQ ID NO:18 or 52, 70% of the level or degree of binding of the corresponding wild-type HeV-G, such as set forth in SEQ ID NO:18 or 52, such as at least or at least about 75% of the level or degree of binding of the corresponding wild-type HeV-G, such as set forth in SEQ ID NO:18 or 52, such as at least or at least about 80% of the level or degree of binding of the corresponding wild-type NIV-G, such as set forth in SEQ ID NO:18 or 52, such as at least or at least about 85% of the level or degree of binding of the corresponding wild-type HeV-G, such as set forth in SEQ ID NO:18 or 52, such as at least or at least about 90% of the level or degree of binding of the corresponding wild-type HeV-G, such as set forth in SEQ ID NO:18 or 52, or such as at least or at least about 95% of the level or degree of binding of the corresponding wild-type HeV-G, such as set forth in SEQ ID NO:18 or 52.

[0236] In some embodiments, the G protein or the biologically thereof is a mutant G protein that exhibits reduced binding for the native binding partner of a wild-type G protein. In some embodiments, the mutant G protein or the biologically active portion thereof is a mutant of wild-type Niv-G and exhibits reduced binding to one or both of the native binding partners Ephrin B2 or Ephrin B3. In some embodiments, the mutant G-protein or the biologically active portion, such as a mutant NiV-G protein, exhibits reduced binding to the native binding partner. In some embodiments, the reduced binding to Ephrin B2 or Ephrin B3 is reduced by greater than at or about 5%, at or about 10%, at or about 15%, at or about 20%, at or about 25%, at or about 30%, at or about 40%, at or about 50%, at or about 60%, at or about 70%, at or about 80%, at or about 90%, or at or about 100%.

[0237] In some embodiments, the mutations described herein can improve transduction efficiency. In some embodiments, the mutations described herein allow for specific targeting of other desired cell types that are not Ephrin B2 or Ephrin B3. In some embodiments, the mutations described herein result in at least the partial inability to bind at least one natural receptor, such has reduce the binding to at least one of Ephrin B2 or Ephrin B3. In some embodiments, the mutations described herein interfere with natural receptor recognition.

[0238] In some embodiments, the G protein contains one or more amino acid substitutions in a residue that is involved in the interaction with one or both of Ephrin B2 and Ephrin B3. In some embodiments, the amino acid substitutions correspond to mutations E501A, W504A, Q530A and E533A with reference to numbering set forth in SEQ ID NO:28.

[0239] In some embodiments, the G protein is a mutant G protein containing one or more amino acid substitutions selected from the group consisting of E501A, W504A, Q530A and E533A with reference to numbering set forth in SEQ ID NO:28. In some embodiments, the G protein is a mutant G protein that contains one or more amino acid substitutions elected from the group consisting of E501A, W504A, Q530A and E533A with reference to SEQ ID NO:28 and is a biologically active portion thereof containing an N-terminal truncation. In some embodiments, the mutant NiV-G protein or the biologically active portion thereof is truncated and lacks up to 5 contiguous amino acid residues at or near the N-terminus of the wild-type NiV-G protein (SEQ ID NO:28), 6 contiguous amino acid residues at or near the N-terminus of the wild-type NiV-G protein (SEQ ID NO:28), 7 contiguous amino acid residues at or near the N-terminus of the wild-type NiV-G protein (SEQ ID NO:28), 8 contiguous amino acid residues at or near the N-terminus of the wild-type NiV-G protein (SEQ ID NO:28), 9 contiguous amino acid residues at or near the N-terminus of the wild-type NiV-G protein (SEQ ID NO:28), up to 10 contiguous amino acid residues at or near the N-terminus of the wild-type NiV-G protein (SEQ ID NO:28), 11 contiguous amino acid residues at or near the N-terminus of the wild-type NiV-G protein (SEQ ID NO:28), 12 contiguous amino acid residues at or near the N-terminus of the wild-type NiV-G protein (SEQ ID NO:28), 13 contiguous amino acid residues at or near the N-terminus of the wild-type NiV-G protein (SEQ ID NO:28), 14 contiguous amino acid residues at or near the N-terminus of the wild-type NiV-G protein (SEQ ID NO:28), up to 15 contiguous amino acid residues at or near the N-terminus of the wild-type NiV-G protein (SEQ ID NO:28), 16 contiguous amino acid residues at or near the N-terminus of the wild-type NiV-G protein (SEQ ID NO:28), 17 contiguous amino acid residues at or near the N-terminus of the wild-type NiV-G protein (SEQ ID NO:28), 18 contiguous amino acid residues at or near the N-terminus of the wild-type NiV-G protein (SEQ ID NO:28), 19 contiguous amino acid residues at or near the N-terminus of the wild-type NiV-G protein (SEQ ID NO:28), up to 20 contiguous amino acid residues at or near the N-terminus of the wild-type NiV-G protein (SEQ ID NO:28), 21 contiguous amino acid residues at or near the N-terminus of the wild-type NiV-G protein (SEQ ID NO:28), 22 contiguous amino acid residues at or near the N-terminus of the wild-type NiV-G protein (SEQ ID NO:28), 23 contiguous amino acid residues at or near the N-terminus of the wild-type NiV-G protein (SEQ ID NO:28), 24 contiguous amino acid residues at or near the N-terminus of the wild-type NiV-G protein (SEQ ID NO:28), up to 25 contiguous amino acid residues at or near the N-terminus of the wild-type NiV-G protein (SEQ ID NO:28), 26 contiguous amino acid residues at or near the N-terminus of the wild-type NiV-G protein (SEQ ID NO:28), 27 contiguous amino acid residues at or near the N-terminus of the wild-type NiV-G protein (SEQ ID NO:28), 28 contiguous amino acid residues at or near the N-terminus of the wild-type NiV-G protein (SEQ ID NO:28), 29 contiguous amino acid residues at or near the N-terminus of the wild-type NiV-G protein (SEQ ID NO:28), up to 30 contiguous amino acid residues at or near the N-terminus of the wild-type NiV-G protein (EQ ID NO:28), up to 31 contiguous amino acid residues at or near the N-terminus of the wild-type NiV-G protein (SEQ ID NO:28), 32 contiguous amino acid residues at or near the N-terminus of the wild-type NiV-G protein (SEQ ID NO:28), 33 contiguous amino acid residues at or near the N-terminus of the wild-type NiV-G protein (SEQ ID NO:28), 34 contiguous amino acid residues at or near the N-terminus of the wild-type NiV-G protein (SEQ ID NO:28), 35 contiguous amino acid residues at or near the N-terminus of the wild-type NiV-G protein (SEQ ID NO:28), up to 36 contiguous amino acid residues at or near the N-terminus of the wild-type NiV-G protein (EQ ID NO:28), up to 37 contiguous amino acid residues at or near the N-terminus of the wild-type NiV-G protein (EQ ID NO:28), up to 38 contiguous amino acid residues at or near the N-terminus of the wild-type NiV-G protein (EQ ID NO:28), up to 39 contiguous amino acid residues at or near the N-terminus of the wild-type NiV-G protein (EQ ID NO:28), or up to 40 contiguous amino acid residues at or near the N-terminus of the wild-type NiV-G protein (EQ ID NO:28).

[0240] In some embodiments, the mutant NiV-G protein has the amino acid sequence set forth in SEQ ID NO: 16 or 51 or an amino acid sequence having at least at or about 90%, at least at or about 91%, at least at or about 92%, at least at or about 93%, at least at or about 94%, at least at or about 95%, at or about 96%, at least at or about 97%, at least at or about 98%, or at least at or about 99% sequence identity to SEQ ID NO:16 or 51. In particular embodiments, the G protein has the sequence of amino acids set forth in SEQ ID NO: 16 or 51.

[0241] In some embodiments, the targeted envelope protein contains a G protein or a functionally active variant or biologically active portion and an sdAb variable domain, in which the targeted envelope protein exhibits increased binding for another molecule that is different from the native binding partner of a wild-type G protein. In some embodiments, the molecule can be a protein expressed on the surface of desired target cell. In some embodiments, the increased binding to the other molecule is increased by greater than at or about 25%, at or about 30%, at or about 40%, at or about 50%, at or about 60%, at or about 70%, at or about 80%, at or about 90%, or at or about 100%. In particular embodiments, the binding confers re-targeted binding compared to the binding of a wild-type G protein in which a new or different binding activity is conferred.

[0242] 2. Binding Domain

[0243] In some embodiments, the binding domain can be any agent that binds to a cell surface molecule on a target cells. In some embodiments, the binding domain can be an antibody or an antibody portion or fragment.

[0244] The binding domain may be modulated to have different binding strengths. For example, scFvs and antibodies with various binding strengths may be used to alter the fusion activity of the chimeric attachment proteins towards cells that display high or low amounts of the target antigen. For example DARPins with different affinities may be used to alter the fusion activity towards cells that display high or low amounts of the target antigen. Binding domains may also be modulated to target different regions on the target ligand, which will affect the fusion rate with cells displaying the target.

[0245] The binding domain may comprise a humanized antibody molecule, intact IgA, IgG, IgE or IgM antibody; bi- or multi-specific antibody (e.g., Zybodies®, etc); antibody fragments such as Fab fragments, Fab′ fragments, F(ab′)2 fragments, Fd′ fragments, Fd fragments, and isolated CDRs or sets thereof; single chain Fvs; polypeptide-Fc fusions; single domain antibodies (e.g., shark single domain antibodies such as IgNAR or fragments thereof); cameloid antibodies; masked antibodies (e.g., Probodies®); Small Modular ImmunoPharmaceuticals (“SMIPsTM”); single chain or Tandem diabodies (TandAb®); VHHs; Anticalins®; Nanobodies®; minibodies; BiTE®s; ankyrin repeat proteins or DARPINs®; Avimers®; DARTs; TCR-like antibodies; Adnectins®; Affilins®; Trans-bodies®; Affibodies®; TrimerX®; MicroProteins; Fynomers®, Centyrins®; and KALBITOR®s. A targeting moiety can also include an antibody or an antigen-binding fragment thereof (e.g., Fab, Fab′, F(ab′)2, Fv fragments, scFv antibody fragments, disulfide-linked Fvs (sdFv), a Fd fragment consisting of the VH and CH1 domains, linear antibodies, single domain antibodies such as sdAb (either VL or VH), nanobodies, or camelid VHH domains), an antigen-binding fibronectin type III (Fn3) scaffold such as a fibronectin polypeptide minibody, a ligand, a cytokine, a chemokine, or a T cell receptor (TCRs).

[0246] In some embodiments, the binding domain is a single chain molecule. In some embodiments, the binding domain is a single domain antibody. In some embodiments, the binding domain is a single chain variable fragment. In particular embodiments, the binding domain contains an antibody variable sequence (s) that is human or humanized.

[0247] In some embodiments, the binding domain is a single domain antibody. In some embodiments, the single domain antibody can be human or humanized In some embodiments, the single domain antibody or portion thereof is naturally occurring. In some embodiments, the single domain antibody or portion thereof is synthetic.

[0248] In some embodiments, the single domain antibodies are antibodies whose complementary determining regions are part of a single domain polypeptide. In some embodiments, the single domain antibody is a heavy chain only antibody variable domain. In some embodiments, the single domain antibody does not include light chains.

[0249] In some embodiments, the heavy chain antibody devoid of light chains is referred to as VHH. In some embodiments, the single domain antibody antibodies have a molecular weight of 12-15 kDa. In some embodiments, the single domain antibody antibodies include camelid antibodies or shark antibodies. In some embodiments, the single domain antibody molecule is derived from antibodies raised in Camelidae species, for example in camel, llama, dromedary, alpaca, vicuna and guanaco. In some embodiments, the single domain antibody is referred to as immunoglobulin new antigen receptors (IgNARs) and is derived from cartilaginous fishes. In some embodiments, the single domain antibody is generated by splitting dimeric variable domains of human or mouse IgG into monomers and camelizing critical residues.

[0250] In some embodiments, the single domain antibody can be generated from phage display libraries. In some embodiments, the phage display libraries are generated from a VHH repertoire of camelids immunized with various antigens, as described in Arbabi et al., FEBS Letters, 414, 521-526 (1997); Lauwereys et al., EMBO J., 17, 3512-3520 (1998); Decanniere et al., Structure, 7, 361-370 (1999). In some embodiments, the phage display library is generated comprising antibody fragments of a non-immunized camelid. In some embodiments, single domain antibodies a library of human single domain antibodies is synthetically generated by introducing diversity into one or more scaffolds.

[0251] In some embodiments, the C-terminus of the single domain antibody is attached to the C-terminus of the G protein or biologically active portion thereof. In some embodiments, the N-terminus of the single domain antibody is exposed on the exterior surface of the lipid bilayer. In some embodiments, the N-terminus of the single domain antibody binds to a cell surface molecule of a target cell. In some embodiments, the single domain antibody specifically binds to a cell surface molecule present on a target cell. In some embodiments, the cell surface molecule is a protein, glycan, lipid or low molecular weight molecule.

[0252] In some embodiments, the cell surface molecule of a target cell is an antigen or portion thereof. In some embodiments, the single domain antibody or portion thereof is an antibody having a single monomeric domain antigen binding/recognition domain that is able to bind selectively to a specific antigen. In some embodiments, the single domain antibody binds an antigen present on a target cell.

[0253] Exemplary cells include polymorphonuclear cells (also known as PMN, PML, PMNL, or granulocytes), stem cells, embryonic stem cells, neural stem cells, mesenchymal stem cells (MSCs), hematopoietic stem cells (HSCs), human myogenic stem cells, muscle-derived stem cells (MuStem), embryonic stem cells (ES or ESCs), limbal epithelial stem cells, cardio-myogenic stem cells, cardiomyocytes, progenitor cells, immune effector cells, lymphocytes, macrophages, dendritic cells, natural killer cells, T cells, cytotoxic T lymphocytes, allogenic cells, resident cardiac cells, induced pluripotent stem cells (iPS), adipose-derived or phenotypic modified stem or progenitor cells, CD133+ cells, aldehyde dehydrogenase-positive cells (ALDH+), umbilical cord blood (UCB) cells, peripheral blood stem cells (PBSCs), neurons, neural progenitor cells, pancreatic beta cells, glial cells, or hepatocytes,

[0254] In some embodiments, the target cell is a cell of a target tissue. The target tissue can include liver, lungs, heart, spleen, pancreas, gastrointestinal tract, kidney, testes, ovaries, brain, reproductive organs, central nervous system, peripheral nervous system, skeletal muscle, endothelium, inner ear, or eye.

[0255] In some embodiments, the target cell is a muscle cell (e.g., skeletal muscle cell), kidney cell, liver cell (e.g. hepatocyte), or a cadiac cell (e.g. cardiomyocyte). In some embodiments, the target cell is a cardiac cell, e.g., a cardiomyocyte (e.g., a quiescent cardiomyocyte), a hepatoblast (e.g., a bile duct hepatoblast), an epithelial cell, a T cell (e.g. a naive T cell), a macrophage (e.g., a tumor infiltrating macrophage), or a fibroblast (e.g., a cardiac fibroblast).

[0256] In some embodiments, the target cell is a tumor-infiltrating lymphocyte, a T cell, a neoplastic or tumor cell, a virus-infected cell, a stem cell, a central nervous system (CNS) cell, a hematopoeietic stem cell (HSC), a liver cell or a fully differentiated cell. In some embodiments, the target cell is a CD3+ T cell, a CD4+ Tcell, a CD8+ T cell, a hepatocyte, a haematepoietic stem cell, a CD34+ haematepoietic stem cell, a CD105+ haematepoietic stem cell, a CD117+ haematepoietic stem cell, a CD105+ endothelial cell, a B cell, a CD20+ B cell, a CD19+ B cell, a cancer cell, a CD133+ cancer cell, an EpCAM+ cancer cell, a CD19+ cancer cell, a Her2/Neu+ cancer cell, a GluA2+ neuron, a GluA4+ neuron, a NKG2D+ natural killer cell, a SLC1A3+ astrocyte, a SLC7A10+ adipocyte, or a CD30+ lung epithelial cell.

[0257] In some embodiments, the target cell is an antigen presenting cell, an MHC class II+ cell, a professional antigen presenting cell, an atypical antigen presenting cell, a macrophage, a dendritic cell, a myeloid dendritic cell, a plasmacyteoid dendritic cell, a CD11c+ cell, a CD11b+ cell, a splenocyte, a B cell, a hepatocyte, a endothelial cell, or a non-cancerous cell).

[0258] In some embodiments, the cell surface molecule is any one of CD8, CD4, asialoglycoprotein receptor 2 (ASGR2), transmembrane 4 L6 family member 5 (TM4SF5), low density lipoprotein receptor (LDLR) or asialoglycoprotein 1 (ASGR1).

[0259] In some embodiments, the G protein or functionally active variant or biologically active portion thereof is linked directly to the sdAb variable domain. In some embodiments, the targeted envelope protein is a fusion protein that has the following structure: (N′-single domain antibody-C′)-(C′-G protein-N′).

[0260] In some embodiments, the G protein or functionally active variant or biologically active portion thereof is linked indirectly via a linker to the the sdAb variable domain. In some embodiments, the linker is a peptide linker. In some embodiments, the linker is a chemical linker.

[0261] In some embodiments, the linker is a peptide linker and the targeted envelope protein is a fusion protein containing the G protein or functionally active variant or biologically active portion thereof linked via a peptide linker to the sdAb variable domain. In some embodiments, the targeted envelope protein is a fusion protein that has the following structure: (N′-single domain antibody-C′)-Linker-(C′-G protein-N′).

[0262] In some embodiments, the peptide linker is up to 65 amino acids in length. In some embodiments, the peptide linker comprises from or from about 2 to 65 amino acids, 2 to 60 amino acids, 2 to 56 amino acids, 2 to 52 amino acids, 2 to 48 amino acids, 2 to 44 amino acids, 2 to 40 amino acids, 2 to 36 amino acids, 2 to 32 amino acids, 2 to 28 amino acids, 2 to 24 amino acids, 2 to 20 amino acids, 2 to 18 amino acids, 2 to 14 amino acids, 2 to 12 amino acids, 2 to 10 amino acids, 2 to 8 amino acids, 2 to 6 amino acids, 6 to 65 amino acids, 6 to 60 amino acids, 6 to 56 amino acids, 6 to 52 amino acids, 6 to 48 amino acids, 6 to 44 amino acids, 6 to 40 amino acids, 6 to 36 amino acids, 6 to 32 amino acids, 6 to 28 amino acids, 6 to 24 amino acids, 6 to 20 amino acids, 6 to 18 amino acids, 6 to 14 amino acids, 6 to 12 amino acids, 6 to 10 amino acids, 6 to 8 amino acids, 8 to 65 amino acids, 8 to 60 amino acids, 8 to 56 amino acids, 8 to 52 amino acids, 8 to 48 amino acids, 8 to 44 amino acids, 8 to 40 amino acids, 8 to 36 amino acids, 8 to 32 amino acids, 8 to 28 amino acids, 8 to 24 amino acids, 8 to 20 amino acids, 8 to 18 amino acids, 8 to 14 amino acids, 8 to 12 amino acids, 8 to 10 amino acids, 10 to 65 amino acids, 10 to 60 amino acids, 10 to 56 amino acids, 10 to 52 amino acids, 10 to 48 amino acids, 10 to 44 amino acids, 10 to 40 amino acids, 10 to 36 amino acids, 10 to 32 amino acids, 10 to 28 amino acids, 10 to 24 amino acids, 10 to 20 amino acids, 10 to 18 amino acids, 10 to 14 amino acids, 10 to 12 amino acids, 12 to 65 amino acids, 12 to 60 amino acids, 12 to 56 amino acids, 12 to 52 amino acids, 12 to 48 amino acids, 12 to 44 amino acids, 12 to 40 amino acids, 12 to 36 amino acids, 12 to 32 amino acids, 12 to 28 amino acids, 12 to 24 amino acids, 12 to 20 amino acids, 12 to 18 amino acids, 12 to 14 amino acids, 14 to 65 amino acids, 14 to 60 amino acids, 14 to 56 amino acids, 14 to 52 amino acids, 14 to 48 amino acids, 14 to 44 amino acids, 14 to 40 amino acids, 14 to 36 amino acids, 14 to 32 amino acids, 14 to 28 amino acids, 14 to 24 amino acids, 14 to 20 amino acids, 14 to 18 amino acids, 18 to 65 amino acids, 18 to 60 amino acids, 18 to 56 amino acids, 18 to 52 amino acids, 18 to 48 amino acids, 18 to 44 amino acids, 18 to 40 amino acids, 18 to 36 amino acids, 18 to 32 amino acids, 18 to 28 amino acids, 18 to 24 amino acids, 18 to 20 amino acids, 20 to 65 amino acids, 20 to 60 amino acids, 20 to 56 amino acids, 20 to 52 amino acids, 20 to 48 amino acids, 20 to 44 amino acids, 20 to 40 amino acids, 20 to 36 amino acids, 20 to 32 amino acids, 20 to 28 amino acids, 20 to 26 amino acids, 20 to 24 amino acids, 24 to 65 amino acids, 24 to 60 amino acids, 24 to 56 amino acids, 24 to 52 amino acids, 24 to 48 amino acids, 24 to 44 amino acids, 24 to 40 amino acids, 24 to 36 amino acids, 24 to 32 amino acids, 24 to 30 amino acids, 24 to 28 amino acids, 28 to 65 amino acids, 28 to 60 amino acids, 28 to 56 amino acids, 28 to 52 amino acids, 28 to 48 amino acids, 28 to 44 amino acids, 28 to 40 amino acids, 28 to 36 amino acids, 28 to 34 amino acids, 28 to 32 amino acids, 32 to 65 amino acids, 32 to 60 amino acids, 32 to 56 amino acids, 32 to 52 amino acids, 32 to 48 amino acids, 32 to 44 amino acids, 32 to 40 amino acids, 32 to 38 amino acids, 32 to 36 amino acids, 36 to 65 amino acids, 36 to 60 amino acids, 36 to 56 amino acids, 36 to 52 amino acids, 36 to 48 amino acids, 36 to 44 amino acids, 36 to 40 amino acids, 40 to 65 amino acids, 40 to 60 amino acids, 40 to 56 amino acids, 40 to 52 amino acids, 40 to 48 amino acids, 40 to 44 amino acids, 44 to 65 amino acids, 44 to 60 amino acids, 44 to 56 amino acids, 44 to 52 amino acids, 44 to 48 amino acids, 48 to 65 amino acids, 48 to 60 amino acids, 48 to 56 amino acids, 48 to 52 amino acids, 50 to 65 amino acids, 50 to 60 amino acids, 50 to 56 amino acids, 50 to 52 amino acids, 54 to 65 amino acids, 54 to 60 amino acids, 54 to 56 amino acids, 58 to 65 amino acids, 58 to 60 amino acids, or 60 to 65 amino acids. In some embodiments, the peptide linker is a polypeptide that is 3, 4, 5, 6, 7, 8, 9, 10, 11, 12, 13, 14, 15, 16, 17, 18, 19, 20, 21, 22, 23, 24, 25, 26, 27, 28, 29, 30, 31, 32, 33, 34, 35, 36, 37, 38, 39, 40, 41, 42, 43, 44, 45, 46, 47, 48, 49, 50, 51, 52, 53, 54, 55, 56, 57, 58, 59, 60, 61, 62, 63, 64, or 65 amino acids in length.

[0263] In particular embodiments, the linker is a flexible peptide linker. In some such embodiments, the linker is 1-20 amino acids, such as 1-20 amino acids predominantly composed of glycine. In some embodiments, the linker is 1-20 amino acids, such as 1-20 amino acids predominantly composed of glycine and serine. In some embodiments, the linker is a flexible peptide linker containing amino acids Glycine and Serine, referred to as GS-linkers. In some embodiments, the peptide linker includes the sequences GS, GGS, GGGGS (SEQ ID NO:43), GGGGGS (SEQ ID NO:41) or combinations thereof. In some embodiments, the polypeptide linker has the sequence (GGS)n, wherein n is 1 to 10. In some embodiments, the polypeptide linker has the sequence (GGGGS)n, (SEQ ID NO:42) wherein n is 1 to 10. In some embodiments, the polypeptide linker has the sequence (GGGGGS)n (SEQ ID NO:27), wherein n is 1 to 6.

[0264] 3. Polynucleotides

[0265] Provided herein are polynucleotides comprising a nucleic acid sequence encoding a targeted envelope protein. In some embodiments, the polynucleotides comprise a nucleic acid sequence encoding a G protein or biologically active portion thereof. In some embodiments, the polynucleotides further comprise a nucleic acid sequence encoding a single domain antibody (sdAb) variable domain or biologically active portion thereof. The polynucleotides may include a sequence of nucleotides encoding any of the targeted envelope proteins described above. The polynucleotide can be a synthetic nucleic acid. Also provided are expression vector containing any of the provided polynucleotides.

[0266] In some of any embodiments, expression of natural or synthetic nucleic acids is typically achieved by operably linking a nucleic acid encoding the gene of interest to a promoter and incorporating the construct into an expression vector. In some embodiments, vectors can be suitable for replication and integration in eukaryotes. In some embodiments, cloning vectors contain transcription and translation terminators, initiation sequences, and promoters useful for expression of the desired nucleic acid sequence. In some of any embodiments, a plasmid comprises a promoter suitable for expression in a cell.

[0267] In some embodiments, the polynucleotides contain at least one promoter that is operatively linked to control expression of the targeted envelope protein containing the G protein and the single domain antibody (sdAb) variable domain. For expression of the targeted envelope protein, at least one module in each promoter functions to position the start site for RNA synthesis. The best known example of this is the TATA box, but in some promoters lacking a TATA box, such as the promoter for the mammalian terminal deoxynucleotidyl transferase gene and the promoter for the SV40 genes, a discrete element overlying the start site itself helps to fix the place of initiation.

[0268] In some embodiments, additional promoter elements, e.g., enhancers, regulate the frequency of transcriptional initiation. In some embodiments, additional promoter elements are located in the region 30-110 bp upstream of the start site, although a number of promoters have recently been shown to contain functional elements downstream of the start site as well. In some embodiments, spacing between promoter elements frequently is flexible, so that promoter function is preserved when elements are inverted or moved relative to one another. In some embodiments, the thymidine kinase (tk) promoter, the spacing between promoter elements can be increased to 50 bp apart before activity begins to decline. In some embodiments, depending on the promoter, individual elements can function either cooperatively or independently to activate transcription.

[0269] A promoter may be one naturally associated with a gene or polynucleotide sequence, as may be obtained by isolating the 5′ non-coding sequences located upstream of the coding segment and/or exon. Such a promoter can be referred to as “endogenous.” Similarly, an enhancer may be one naturally associated with a polynucleotide sequence, located either downstream or upstream of that sequence. Alternatively, certain advantages will be gained by positioning the coding polynucleotide segment under the control of a recombinant or heterologous promoter, which refers to a promoter that is not normally associated with a polynucleotide sequence in its natural environment. A recombinant or heterologous enhancer refers also to an enhancer not normally associated with a polynucleotide sequence in its natural environment. Such promoters or enhancers may include promoters or enhancers of other genes, and promoters or enhancers isolated from any other prokaryotic, viral, or eukaryotic cell, and promoters or enhancers not “naturally occurring,” i.e., containing different elements of different transcriptional regulatory regions, and/or mutations that alter expression. In addition to producing nucleic acid sequences of promoters and enhancers synthetically, sequences may be produced using recombinant cloning and/or nucleic acid amplification technology, including PCR, in connection with the compositions disclosed herein (U.S. Pat. Nos. 4,683,202 and 5,928,906).

[0270] In some embodiments, a suitable promoter is the immediate early cytomegalovirus (CMV) promoter sequence. In some embodiments, the promoter sequence is a strong constitutive promoter sequence capable of driving high levels of expression of any polynucleotide sequence operatively linked thereto. In some embodiments, a suitable promoter is Elongation Growth Factor-la (EF-1 a). In some embodiments, other constitutive promoter sequences may also be used, including, but not limited to the simian virus 40 (SV40) early promoter, mouse mammary tumor virus (MMTV), human immunodeficiency virus (HIV) long terminal repeat (LTR) promoter, MoMuLV promoter, an avian leukemia virus promoter, an Epstein-Barr virus immediate early promoter, a Rous sarcoma virus promoter, as well as human gene promoters such as, but not limited to, the actin promoter, the myosin promoter, the hemoglobin promoter, and the creatine kinase promoter.

[0271] In some embodiments, the promoter is an inducible promoter. In some embodiments, the inducible promoter provides a molecular switch capable of turning on expression of the polynucleotide sequence which it is operatively linked when such expression is desired, or turning off the expression when expression is not desired. In some embodiments, inducible promoters comprise metallothionine promoter, a glucocorticoid promoter, a progesterone promoter, and a tetracycline promoter.

[0272] In some embodiments, exogenously controlled inducible promoters can be used to regulate expression of the G protein and single domain antibody (sdAb) variable domain. For example, radiation-inducible promoters, heat-inducible promoters, and/or drug-inducible promoters can be used to selectively drive transgene expression in, for example, targeted regions. In such embodiments, the location, duration, and level of transgene expression can be regulated by the administration of the exogenous source of induction.

[0273] In some embodiments, expression of the targeted envelope protein containing a G protein and single domain antibody (sdAb) variable domain is regulated using a drug-inducible promoter. For example, in some cases, the promoter, enhancer, or transactivator comprises a Lac operator sequence, a tetracycline operator sequence, a galactose operator sequence, a doxycycline operator sequence, a rapamycin operator sequence, a tamoxifen operator sequence, or a hormone-responsive operator sequence, or an analog thereof. In some instances, the inducible promoter comprises a tetracycline response element (TRE). In some embodiments, the inducible promoter comprises an estrogen response element (ERE), which can activate gene expression in the presence of tamoxifen. In some instances, a drug-inducible element, such as a TRE, can be combined with a selected promoter to enhance transcription in the presence of drug, such as doxycycline. In some embodiments, the drug-inducible promoter is a small molecule-inducible promoter.

[0274] Any of the provided polynucleotides can be modified to remove CpG motifs and/or to optimize codons for translation in a particular species, such as human, canine, feline, equine, ovine, bovine, etc. species. In some embodiments, the polynucleotides are optimized for human codon usage (i.e., human codon-optimized). In some embodiments, the polynucleotides are modified to remove CpG motifs. In other embodiments, the provided polynucleotides are modified to remove CpG motifs and are codon-optimized, such as human codon-optimized. Methods of codon optimization and CpG motif detection and modification are well-known. Typically, polynucleotide optimization enhances transgene expression, increases transgene stability and preserves the amino acid sequence of the encoded polypeptide.

[0275] In order to assess the expression of the targeted envelope protein, the expression vector to be introduced into a cell can also contain either a selectable marker gene or a reporter gene or both to facilitate identification and selection of expressing particles, e.g. viral particles. In other embodiments, the selectable marker may be carried on a separate piece of DNA and used in a co-transfection procedure. Both selectable markers and reporter genes may be flanked with appropriate regulatory sequences to enable expression in the host cells. Useful selectable markers are known in the art and include, for example, antibiotic-resistance genes, such as neo and the like.

[0276] Reporter genes are used for identifying potentially transfected cells and for evaluating the functionality of regulatory sequences. Reporter genes that encode for easily assayable proteins are well known in the art. In general, a reporter gene is a gene that is not present in or expressed by the recipient organism or tissue and that encodes a protein whose expression is manifested by some easily detectable property, e.g., enzymatic activity. Expression of the reporter gene is assayed at a suitable time after the DNA has been introduced into the recipient cells.

[0277] Suitable reporter genes may include genes encoding luciferase, beta-galactosidase, chloramphenicol acetyl transferase, secreted alkaline phosphatase, or the green fluorescent protein gene (see, e.g., Ui-Tei et al., 2000, FEBS Lett. 479:79-82). Suitable expression systems are well known and may be prepared using well known techniques or obtained commercially. Internal deletion constructs may be generated using unique internal restriction sites or by partial digestion of non-unique restriction sites. Constructs may then be transfected into cells that display high levels of the desired polynucleotide and/or polypeptide expression. In general, the construct with the minimal 5′ flanking region showing the highest level of expression of reporter gene is identified as the promoter. Such promoter regions may be linked to a reporter gene and used to evaluate agents for the ability to modulate promoter-driven transcription.

[0278] B. Fusogen (e.g. Henipavirus F Protein)

[0279] In some embodiments, the targeted lipid particle comprises one or more fusogens. In some embodiments, the targeted lipid particle contains an exogenous or overexpressed fusogen. In some embodiments, the fusogen is disposed in the lipid bilayer. In some embodiments, the fusogen facilitates the fusion of the targeted lipid particle to a membrane. In some embodiments, the membrane is a plasma cell membrane.

[0280] In some embodiments, fusogens comprise protein based, lipid based, and chemical based fusogens. In some embodiments, the targeted lipid particle comprises a first fusogen comprising a protein fusogen and a second fusogen comprising a lipid fusogen or chemical fusogen. In some embodiments, the fusogen binds fusogen binding partner on a target cell surface.

[0281] In some embodiments, the fusogen comprises a protein with a hydrophobic fusion peptide domain. In some embodiments, the fusogen comprises a henipavirus F protein molecule or biologically active portion thereof. In some embodiments, the Henipavirus F protein is a Hendra (Hey) virus F protein, a Nipah (NiV) virus F-protein, a Cedar (CedPV) virus F protein, a Mojiang virus F protein or a bat Paramyxovirus F protein or a biologically active portion thereof.

[0282] Table 4 provides non-limiting examples of F proteins. In some embodiments, the N-terminal hydrophobic fusion peptide domain of the F protein molecule or biologically active portion thereof is exposed on the outside of lipid bilayer.

[0283] F proteins of henipaviruses are encoded as F₀ precursors containing a signal peptide (e.g. corresponding to amino acid residues 1-26 of SEQ ID NO:1). Following cleavage of the signal peptide, the mature F₀ (e.g. SEQ ID NO:2) is transported to the cell surface, then endocytosed and cleaved by cathepsin L (e.g. between amino acids 109-110 of SEQ ID NO:1) into the mature fusogenic subunits F1 (e.g. corresponding to amino acids 110-546 of SEQ ID NO:1; set forth in SEQ ID NO:4) and F2 (e.g. corresponding to amino acid residues 27-109 of SEQ ID NO:1; set forth in SEQ ID NO:3). The F1 and F2 subunits are associated by a disulfide bond and recycled back to the cell surface. The F1 subunit contains the fusion peptide domain located at the N terminus of the F1 subunit (e.g. .g. corresponding to amino acids 110-129 of SEQ ID NO:1) where it is able to insert into a cell membrane to drive fusion. In particular cases, fusion activity is blocked by association of the F protein with G protein, until G engages with a target molecule resulting in its disassociation from F and exposure of the fusion peptide to mediate membrane fusion.

[0284] Among different henipavirus species, the sequence and activity of the F protein is highly conserved. For examples, the F protein of NiV and HeV viruses share 89% amino acid sequence identity. Further, in some cases, the henipavirus F proteins exhibit compatibility with G proteins from other species to trigger fusion (Brandel-Tretheway et al. Journal of Virology. 2019. 93(13):e00577-19). In some aspects or the provided re-targeted lipid particles, the F protein is heterologous to the G protein, i.e. the F and G protein or biologically active portions are from different henipavirus species. For example, the F protein is from Hendra virus and the G protein is from Nipah virus. In other aspects, the F protein can be a chimeric F protein containing regions of F proteins from different species of Henipavirus. In some embodiments, switching a region of amino acid residues of the F protein from one species of Henipavirus to another can result in fusion to the G protein of the species comprising the amino acid insertion. (Brandel-Tretheway et al. 2019). In some cases, the chimeric F protein contains an extracellular domain from one henipavirus species and a transmembrane and/or cytoplasmic domain from a different henipavirus species. For example, the F protein contains an extracellular domain of Hendra virus and a transmembrane/cytoplasmic domain of Nipah virus. F protein sequences disclosed herein are predominantly disclosed as expressed sequences including an N-terminal signal sequence. As such N-terminal signal sequences are commonly cleaved co- or post-translationally, the mature protein sequences for all F protein sequences disclosed herein are also contemplated as lacking the N-terminal signal sequence.

TABLE 4
Henipavirus F sequence clusters. Column 1, Genbank ID includes the Genbank ID of
the whole genome sequence of the virus that is the centroid sequence of the cluster. Column 2,
Nucleotides of CDS provides the nucleotides corresponding to the CDS of the gene in the whole
genome. Column 3, Full Gene Name, provides the full name of the gene including Genbank ID,
virus species, strain, and protein name. Nipah virus F protein is >80% identical to that of
Hendra virus and is found within the same sequence cluster. Column 4, Sequence, provides the
amino acid sequence of the gene. Column 5, #Sequences/Cluster, provides the number of
sequences that cluster with this centroid sequence. Column 6 provides the SEQ ID numbers for
the described sequences.

| | | | | | | SEQ |
|---|---|---|---|---|---|---|
| | | | | | | ID |
| Gen- | Nucleotides | | | | SEQ | (without |
| bank | of | Full Gene | | #Sequences/ | ID | signal |
| ID | CDS | Name | Sequence | Cluster | NO | sequence) |
| AF | 6618 | gb: AF017149\| | MATQEVRLKCLLCGIIVLVLSLEGLGILHYEK | 29 | 17 | 59 |
| 017 | - | Organism: Hen | LSKIGLVKGITRKYKIKSNPLTKDIVIKMIPNVS | | | |
| 149 | 8258 | dra virus\|Strain | NVSKCTGTVMENYKSRLTGILSPIKGAIELYN | | | |
| | | Name: UNKN | NNTHDLVGDVKLAGVVMAGIAIGIATAAQIT | | | |
| | | OWN- | AGVALYEAMKNADNINKLKSSIESTNEAVVK | | | |
| | | AF017149\|Prot | LQETAEKTVYVLTALQDYINTNLVPTIDQISC | | | |
| | | ein | KQTELALDLALSKYLSDLLFVFGPNLQDPVSN | | | |
| | | Name: fusion\|G | SMTIQAISQAFGGNYETLLRTLGYATEDFDDL | | | |
| | | ene Symbol: F | LESDSIAGQIVYVDLSSYYIIVRVYFPILTEIQQ | | | |
| | | | AYVQELLPVSENNDNSEWISIVPNEVLIRNTLI | | | |
| | | | SNIEVKYCLITKKSVICNQDYATPMTASVREC | | | |
| | | | LTGSTDKCPRELVVSSHVPRFALSGGVLFANC | | | |
| | | | ISVTCQCQTTGRAISQSGEQTLLMIDNTTCTTV | | | |
| | | | VLGNIIISLGKYLGSINYNSESIAVGPPVYTDK | | | |
| | | | VDISSQISSMNQSLQQSKDYIKEAQKILDTVNP | | | |
| | | | SLISMLSMIILYVLSIAALCIGLITFISFVIVEKK | | | |
| | | | RGNYSRLDDRQVRPVSNGDLYYIGT | | | |
| Q9I | | Additional in | MVVILDKRCYCNLLILILMISECSVGILHYEKL | 1 | 2 | |
| H6 | | cluster: | SKIGLVKGVTRKYKIKSNPLTKDIVIKMIPNVS | | | |
| 3 | | sp\|Q9IH63\|FU | NMSQCTGSVMENYKTRLNGILTPIKGALEIYK | | | |
| | | S_NIPAV | NNTHDLVGDVRLAGVIMAGVAIGIATAAQIT | | | |
| | | Fusion | AGVALYEAMKNADNINKLKSSIESTNEAVVK | | | |
| | | glycoprotein | LQETAEKTVYVLTALQDYINTNLVPTIDKISC | | | |
| | | F0 OS = Nipah | KQTELSLDLALSKYLSDLLFVFGPNLQDPVSN | | | |
| | | virus | SMTIQAISQAFGGNYETLLRTLGYATEDFDDL | | | |
| | | | LESDSITGQIIYVDLSSYYIIVRVYFPILTEIQQA | | | |
| | | | YIQELLPVSFNNDNSEWISIVPNFILVRNTLISN | | | |
| | | | IEIGFCLITKRSVICNQDYATPMTNNMRECLTG | | | |
| | | | STEKCPRELVVSSHVPRFALSNGVLFANCISVT | | | |
| | | | CQCQTTGRAISQSGEQTLLMIDNTTCPTAVLG | | | |
| | | | NVIISLGKYLGSVNYNSEGIAIGPPVFTDKVDI | | | |
| | | | SSQISSMNQSLQQSKDYIKEAQRLLDTVNPSLI | | | |
| | | | SMLSMIILYVLSIASLCIGLITFISFIIVEKKRNT | | | |
| | | | YSRLEDRRVRPTSSGDLYYIGT | | | |
| JQ | 6129 | gb: JQ001776: 6 | MSNKRTTVLIIISYTLFYLNNAAIVGFDFDKLN | 3 | 24 | 57 |
| 001 | - | 129- | KIGVVQGRVLNYKIKGDPMTKDLVLKFIPNIV | | | |
| 776 | 8166 | 8166\|Organism: | NITECVREPLSRYNETVRRLLLPIHNMLGLYL | | | |
| | | Cedar | NNTNAKMTGLMIAGVIMGGIAIGIATAAQITA | | | |
| | | virus\|Strain | GFALYEAKKNTENIQKLTDSIMKTQDSIDKLT | | | |
| | | Name: CG1a\|Pr | DSVGTSILILNKLQTYINNQLVPNLELLSCRQN | | | |
| | | otein | KOEFDLMLTKYLVDLMTVIGPNINNPVNKDM | | | |
| | | Name: fusion | TIQSLSLLFDGNYDIMMSELGYTPQDFLDLIES | | | |
| | | glycoprotein\|G | KSITGQIIYVDMENLYVVIRTYLPTHEVPDAQI | | | |
| | | ene Symbol: F | YEFNKITMSSNGGEYLSTIPNFILIRGNYMSNI | | | |
| | | | DVATCYMTKASVICNQDYSLPMSQNLRSCYQ | | | |
| | | | GETEYCPVEAVIASHSPRFALTNGVIFANCINT | | | |
| | | | ICRCQDNGKTITQNINQFVSMIDNSTCNDVMV | | | |
| | | | DKFTIKVGKYMGRKDINNINIQIGPQIIIDKVD | | | |
| | | | LSNEINKMNQSLKDSIFYLREAKRILDSVNISLI | | | |
| | | | SPSVQLFLIIISVLSFIILLIIIVYLYCKSKHSYKY | | | |
| | | | NKFIDDPDYYNDYKRERINGKASKSNNIYYV | | | |
| | | | GD | | | |
| NC_ | 5950 | gb: NC_025352: | MALNKNMFSSLFLGYLLVYATTVQSSIHYDS | 2 | 25 | 60 |
| 02 | - | 5950- | LSKVGVIKGLTYNYKIKGSPSTKLMVVKLIPNI | | | |
| 535 | 8712 | 8712\|Organism: | DSVKNCTQKQYDEYKNLVRKALEPVKMAID | | | |
| 2 | | Mojiang | TMLNNVKSGNNKYRFAGAIMAGVALGVATA | | | |
| | | virus\|Strain | ATVTAGIALHRSNENAQAIANMKSAIQNTNE | | | |
| | | Name: Tonggua | AVKQLQLANKQTLAVIDTIRGEINNNIIPVINQ | | | |
| | | n1\|Protein | LSCDTIGLSVGIRLTQYYSEIITAFGPALQNPV | | | |
| | | Name: fusion | NTRITIQAISSVFNGNFDELLKIMGYTSGDLYE | | | |
| | | protein\|Gene | ILHSELIRGNIIDVDVDAGYIALEIEFPNLTLVP | | | |
| | | Symbol: F | NAVVQELMPISYNIDGDEWVTLVPRFVLTRTT | | | |
| | | | LLSNIDTSRCTITDSSVICDNDYALPMSHELIG | | | |
| | | | CLQGDTSKCAREKVVSSYVPKFALSDGLVYA | | | |
| | | | NCLNTICRCMDTDTPISQSLGATVSLLDNKRC | | | |
| | | | SVYQVGDVLISVGSYLGDGEYNADNVELGPPI | | | |
| | | | VIDKIDIGNQLAGINQTLQEAEDYIEKSEEFLK | | | |
| | | | GVNPSIITLGSMVVLYIFMILIAIVSVIALVLSIK | | | |
| | | | LTVKGNVVRQQFTYTQHVPSMENINYVSH | | | |
| NC_ | 6865 | gb: NC_025256: | MKKKTDNPTISKRGHNHSRGIKSRALLRETDN | 2 | 26 | 58 |
| 02 | - | 6865- | YSNGLIVENLVRNCHHPSKNNLNYTKTQKRD | | | |
| 525 | 8853 | 8853\|Organism: | STIPYRVEERKGHYPKIKHLIDKSYKHIKRGKR | | | |
| 6 | | Bat | RNGHNGNIITIILLLILILKTQMSEGAIHYETLS | | | |
| | | Paramyxovirus | KIGLIKGITREYKVKGTPSSKDIVIKLIPNVTGL | | | |
| | | Eid_he1/GH- | NKCTNISMENYKEQLDKILIPIINNIIELYANSTK | | | |
| | | M74a/GHA/20 | SAPGNARFAGVIIAGVALGVAAAAQITAGIAL | | | |
| | | 09\|Strain | HEARQNAERINLLKDSISATNNAVAELQEATG | | | |
| | | Name: BatPV/E | GIVNVITGMQDYINTNLVPQIDKLQCSQIKTA | | | |
| | | id_he1/GH- | LDISLSQYYSEILTVFGPNLQNPVTTSMSIQAIS | | | |
| | | M74a/GHA/20 | QSFGGNIDLLLNLLGYTANDLLDLLESKSITG | | | |
| | | 09\|Protein | QITYINLEHYFMVIRVYYPIMTTISNAYVQELI | | | |
| | | Name: fusion | KISFNVDGSEWVSLVPSYILIRNSYLSNIDISEC | | | |
| | | protein\|Gene | LITKNSVICRHDFAMPMSYTLKECLTGDTEKC | | | |
| | | Symbol: F | PREAVVTSYVPRFAISGGVIYANCLSTTCQCY | | | |
| | | | QTGKVIAQDGSQTLMMIDNQTCSIVRIEEILIS | | | |
| | | | TGKYLGSQEYNTMHVSVGNPVFTDKLDITSQI | | | |
| | | | SNINQSIEQSKFYLDKSKAILDKINLNLIGSVPI | | | |
| | | | SILFIIAILSLILSIITFVIVMIIVRRYNKYTPLINS | | | |
| | | | DPSSRRSTIQDVYIIPNPGEHSIRSAARSIDRDR | | | |
| | | | D | | | |

[0285] In some embodiments, the F protein is encoded by a nucleotide sequence that encodes the sequence set forth by any one of SEQ ID NOs: 1, 2, 17, 24, 25, 26 or 57-60 or is a functionally active variant or a biologically active portion thereof that has a sequence that is at least at or about 80%, at least at or about 85%, at least at or about 90%, at least at or about 91%, at least at or about 92%, at least at or about 93%, at least at or about 94%, at least at or about 95%, at least at or about 96%, at least at or about 97%, at least at or about 98%, or at least at or about 99% identical to any one of SEQ ID NOS: 1, 2, 17, 24, 25, 26 or 57-60. In particular embodiments, the F protein or the functionally active variant or biologically active portion thereof retains fusogenic activity in conjunction with a Henipavirus G protein, such as a G protein set forth in Section I.A (e.g. NiV-G or HeV-G). Fusogenic activity includes the activity of the F protein in conjunction with a Henipavirus G protein to promote or facilitate fusion of two membrane lumens, such as the lumen of the targeted lipid particle having embedded in its lipid bilayer a henipavirus F and G protein, and a cytoplasm of a target cell, e.g. a cell that contains a surface receptor or molecule that is recognized or bound by the targeted envelope protein. In some embodiments, the F protein and G protein are from the same Henipavirus species (e.g. NiV-G and NiV-F). In some embodiments, the F protein and G protein are from different Henipavirus species (e.g. NiV-G and HeV-F). In particular embodiments, the F protein of the functionally active variant or biologically active portion retains the cleavage site cleaved by cathepsin L (e.g. corresponding to the cleavage site between amino acids 109-110 of SEQ ID NO:1).

[0286] In particular embodiments, the F protein has the sequence of amino acids set forth in SEQ ID NO: 1, SEQ ID NO:2, SEQ ID NO:17, SEQ ID NO: 24, SEQ ID NO:25, SEQ ID NO: 26, SEQ ID NO: 57, SEQ ID NO: 57, SEQ ID NO: 58, SEQ ID NO: 59, or SEQ ID NO: 60 or is a functionally active variant thereof or a biologically active portion thereof that retains fusogenic activity. In some embodiments, the functionally active variant comprises an amino acid sequence having at least at or about 80%, at least at or about 85%, at least at or about 90%, at least at or about 91%, at least at or about 92%, at least at or about 93%, at least at or about 94%, at least at or about 95%, at or about 96%, at least at or about 97%, at least at or about 98%, or at least at or about 99% sequence identity to SEQ ID NO: 1, SEQ ID NO:2, SEQ ID NO:17, SEQ ID NO: 24, SEQ ID NO:25, SEQ ID NO: 26, SEQ ID NO: 57, SEQ ID NO: 57, SEQ ID NO: 58, SEQ ID NO: 59, or SEQ ID NO: 60 and retains fusogenic activity in conjunction with a Henipavirus G protein (e.g., NiV-G or HeV-G). In some embodiments, the biologically active portion has an amino acid sequence having at least at or about 80%, at least at or about 85%, at least at or about 90%, at least at or about 91%, at least at or about 92%, at least at or about 93%, at least at or about 94%, at least at or about 95%, at or about 96%, at least at or about 97%, at least at or about 98%, or at least at or about 99% sequence identity to SEQ ID NO: 1, SEQ ID NO:2, SEQ ID NO:17, SEQ ID NO: 24, SEQ ID NO:25, SEQ ID NO: 26, SEQ ID NO: 57, SEQ ID NO: 57, SEQ ID NO: 58, SEQ ID NO: 59, or SEQ ID NO: 60 and retains fusogenic activity in conjunction with a Henipavirus G protein (e.g., NiV-G or HeV-G).

[0287] Reference to retaining fusogenic activity includes activity (in conjunction with a Henipavirus G protein) that between at or about 10% and at or about 150% or more of the level or degree of binding of the corresponding wild-type F protein, such as set forth in SEQ ID NO: 1, SEQ ID NO:2, SEQ ID NO:17, SEQ ID NO: 24, SEQ ID NO:25, SEQ ID NO: 26, SEQ ID NO: 57, SEQ ID NO: 57, SEQ ID NO: 58, SEQ ID NO: 59, or SEQ ID NO: 60, such as at least or at least about 10% of the level or degree of fusogenic activity of the corresponding wild-type F protein, such as at least or at least about 15% of the level or degree of fusogenic activity of the corresponding wild-type F protein, such as at least or at least about 20% of the level or degree of fusogenic activity of the corresponding wild-type F protein, such as at least or at least about 25% of the level or degree of fusogenic activity of the corresponding wild-type F protein, such as at least or at least about 30% of the level or degree of fusogenic activity of the corresponding wild-type F protein, such as at least or at least about 35% of the level or degree of fusogenic activity of the corresponding wild-type F protein, such as at least or at least about 40% of the level or degree of fusogenic activity of the corresponding wild-type F protein, such as at least or at least about 45% of the level or degree of fusogenic activity of the corresponding wild-type F protein, such as at least or at least about 50% of the level or degree of fusogenic activity of the corresponding wild-type F protein, such as at least or at least about 55% of the level or degree of fusogenic activity of the corresponding wild-type f protein, such as at least or at least about 60% of the level or degree of fusogenic activity of the corresponding wild-type F protein, such as at least or at least about 65% of the level or degree of fusogenic activity of the corresponding wild-type F protein, such as at least or at least about 70% of the level or degree of fusogenic activity of the corresponding wild-type F protein, such as at least or at least about 75% of the level or degree of fusogenic activity of the corresponding wild-type F protein, such as at least or at least about 80% of the level or degree of fusogenic activity of the corresponding wild-type F protein, such as at least or at least about 85% of the level or degree of fusogenic activity of the corresponding wild-type F protein, such as at least or at least about 90% of the level or degree of fusogenic activity of the corresponding wild-type F protein, such as at least or at least about 95% of the level or degree of fusogenic activity of the corresponding wild-type F protein, such as at least or at least about 100% of the level or degree of fusogenic activity of the corresponding wild-type F protein, or such as at least or at least about 120% of the level or degree of fusogenic activity of the corresponding wild-type F protein.

[0288] In some embodiments, the F protein is a mutant F protein that is a functionally active fragment or a biologically active portion containing one or more amino acid mutations, such as one or more amino acid insertions, deletions, substitutions or truncations. In some embodiments, the mutations described herein relate to amino acid insertions, deletions, substitutions or truncations of amino acids compared to a reference F protein sequence. In some embodiments, the reference F protein sequence is the wild-type sequence of an F protein or a biologically active portion thereof. In some embodiments, the mutant F protein or the biologically active portion thereof is a mutant of a wild-type Hendra (Hey) virus F protein, a Nipah (NiV) virus F-protein, a Cedar (CedPV) virus F protein, a Mojiang virus F protein or a bat Paramyxovirus F protein. In some embodiments, the wild-type F protein is encoded by a sequence of nucleotides that encodes any one of SEQ ID NO: 1, 2, 17, 24, 25, 26, or 57-60.

[0289] In some embodiments, the mutant F protein is a biologically active portion of a wild-type F protein that is an N-terminally and/or C-terminally truncated fragment. In some embodiments, the mutant F protein or the biologically active portion of a wild-type F protein thereof comprises one or more amino acid substitutions. In some embodiments, the mutations described herein can improve transduction efficiency. In some embodiments, the mutations described herein can increase fusogenic capacity. Exemplary mutations include any as described, see e.g. Khetawat and Broder 2010 Virology Journal 7:312; Witting et al. 2013 Gene Therapy 20:997-1005; published international; patent application No. WO/2013/148327.

[0290] In some embodiments, the mutant F protein is a biologically active portion that is truncated and lacks up to 20 contiguous amino acid residues at or near the C-terminus of the wild-type F protein, such as a wild-type F protein encoded by a sequence of nucleotides encoding the F protein set forth in any one of SEQ ID NOS: 1, 17, 24, 25 or 26. In some embodiments, the mutant F protein is truncated and lacks up to 19 contiguous amino acids, such as up to 18, 17, 16, 15, 14, 13, 12, 11, 10, 9, 8, 7, 6, 5, 4, 3, 2, or 1 contiguous amino acids at the C-terminus of the wild-type F protein.

[0291] In some embodiments, the F protein or the functionally active variant or biologically active portion thereof comprises an F1 subunit or a fusogenic portion thereof. In some embodiments, the F1 subunit is a proteolytically cleaved portion of the F0 precursor. In some embodiments, the F0 precursor is inactive. In some embodiments, the cleavage of the F0 precursor forms a disulfide-linked F1+F2 heterodimer. In some embodiments, the cleavage exposes the fusion peptide and produces a mature F protein. In some embodiments, the cleavage occurs at or around a single basic residue. In some embodiments, the cleavage occurs at Arginine 109 of NiV-F protein. In some embodiments, cleavage occurs at Lysine 109 of the Hendra virus F protein.

[0292] In some embodiments, the F protein is a wild-type Nipah virus F (NiV-F) protein or is a functionally active variant or biologically active portion thereof. In some embodiments, the F₀ precursor is encoded by a sequence of nucleotides encoding the sequence set forth in SEQ ID NO: 1. The encoding nucleic acid can encode a signal peptide sequence that has the sequence MVVILDKRCY CNLLILILMI SECSVG (SEQ ID NO: 34). In some embodiments, the F protein has the sequence set forth in SEQ ID NO:2. In some examples, the F protein is cleaved into an F1 subunit comprising the sequence set forth in SEQ ID NO:4 and an F2 subunit comprising the sequence set forth in SEQ ID NO: 3.

[0293] In some embodiments, the F protein is a NiV-F protein that is encoded by a sequence of nucleotides encoding the sequence set forth in SEQ ID NO:1, or is a functionally active variant or biologically active portion thereof that has an amino acid sequence having at least at or about 80%, at least at or about 81%, at least at or about 82%, at least at or about 83%, at least at or about 84%, at least at or about 85%, at or about 86%, at least at or about 87%, at least at or about 88%, or at least at or about 89%, at least at or about 90%, at least at or about 91%, at least at or about 92%, at least at or about 93%, at least at or about 94%, at least at or about 95%, at or about 96%, at least at or about 97%, at least at or about 98%, or at least at or about 99% sequence identity to SEQ ID NO: 1. In some embodiments, the NiV-F-protein has the sequence of set forth in SEQ ID NO: 2, or is a functionally active variant or a biologically active portion thereof that has an amino acid sequence having at least at or about 80%, at least at or about 81%, at least at or about 82%, at least at or about 83%, at least at or about 84%, at least at or about 85%, at or about 86%, at least at or about 87%, at least at or about 88%, or at least at or about 89%, at least at or about 90%, at least at or about 91%, at least at or about 92%, at least at or about 93%, at least at or about 94%, at least at or about 95%, at or about 96%, at least at or about 97%, at least at or about 98%, or at least at or about 99% sequence identity to SEQ ID NO: 2. In particular embodiments, the F protein or the functionally active variant or biologically active portion thereof retains the cleavage site cleaved by cathepsin L (e.g. corresponding to the cleavage site between amino acids 109-110 of SEQ ID NO:1).

[0294] In some embodiments, the F protein or the functionally active variant or the biologically active portion thereof includes an F1 subunit that has the sequence set forth in SEQ ID NO: 4, or an amino acid sequence having, at least at or about 80%, at least at or about 81%, at least at or about 82%, at least at or about 83%, at least at or about 84%, at least at or about 85%, at or about 86%, at least at or about 87%, at least at or about 88%, or at least at or about 89% at least at or about 90%, at least at or about 91%, at least at or about 92%, at least at or about 93%, at least at or about 94%, at least at or about 95%, at or about 96%, at least at or about 97%, at least at or about 98%, or at least at or about 99% sequence identity to SEQ ID NO:4.

[0295] In some embodiments, the F protein or the functionally active variant or biologically active portion thereof includes an F2 subunit that has the sequence set forth in SEQ ID NO: 3, or an amino acid sequence having, at least at or about 80%, at least at or about 81%, at least at or about 82%, at least at or about 83%, at least at or about 84%, at least at or about 85%, at or about 86%, at least at or about 87%, at least at or about 88%, or at least at or about 89% at least at or about 90%, at least at or about 91%, at least at or about 92%, at least at or about 93%, at least at or about 94%, at least at or about 95%, at or about 96%, at least at or about 97%, at least at or about 98%, or at least at or about 99% sequence identity to SEQ ID NO:3.

[0296] In some embodiments, the F protein is a mutant NiV-F protein that is a biologically active portion thereof that is truncated and lacks up to 20 contiguous amino acid residues at or near the C-terminus of the wild-type NiV-F protein (e.g. set forth SEQ ID NO:2). In some embodiments, the mutant NiV-F protein comprises an amino acid sequence set forth in SEQ ID NO:5. In some embodiments, the mutant NiV-F protein has a sequence that has at least at or about 90%, at least at or about 91%, at least at or about 92%, at least at or about 93%, at least at or about 94%, at least at or about 95%, at or about 96%, at least at or about 97%, at least at or about 98%, or at least at or about 99% sequence identity to SEQ ID NO: 5. In some embodiments, the mutant F protein contains an F1 protein that has the sequence set forth in SEQ ID NO:6. In some embodiments, the mutant F protein has a sequence that has at least at or about 90%, at least at or about 91%, at least at or about 92%, at least at or about 93%, at least at or about 94%, at least at or about 95%, at or about 96%, at least at or about 97%, at least at or about 98%, or at least at or about 99% sequence identity to SEQ ID NO: 6.

[0297] In some embodiments, the F protein is a mutant NiV-F protein that is a biologically active portion thereof that comprises a 20 amino acid truncation at or near the C-terminus of the wild-type NiV-F protein (SEQ ID NO:2); and a point mutation on an N-linked glycosylation site. In some embodiments, the mutant NiV-F protein comprises an amino acid sequence set forth in SEQ ID NO: 7. In some embodiments, the mutant NiV-F protein has a sequence that has at least at or about 90%, at least at or about 91%, at least at or about 92%, at least at or about 93%, at least at or about 94%, at least at or about 95%, at or about 96%, at least at or about 97%, at least at or about 98%, or at least at or about 99% sequence identity to SEQ ID NO: 7.

[0298] In some embodiments, the F protein is a mutant NiV-F protein that is a biologically active portion thereof that comprises a 22 amino acid truncation at or near the C-terminus of the wild-type NiV-F protein (SEQ ID NO:2). In some embodiments, the NiV-F protein is encoded by a nucleotide sequence that encodes the sequence set forth in SEQ ID NO: 8. In some embodiments, the NiV-F proteins is encoded by a nucleotide sequence that encodes sequence having at least at or about 90%, at least at or about 91%, at least at or about 92%, at least at or about 93%, at least at or about 94%, at least at or about 95%, at or about 96%, at least at or about 97%, at least at or about 98%, or at least at or about 99% sequence identity to SEQ ID NO: 8. In particular embodiments, the variant F protein is a mutant Niv-F protein that has the sequence of amino acids set forth in SEQ ID NO:23. In some embodiments, the NiV-F proteins is encoded by a a sequence having at least at or about 90%, at least at or about 91%, at least at or about 92%, at least at or about 93%, at least at or about 94%, at least at or about 95%, at or about 96%, at least at or about 97%, at least at or about 98%, or at least at or about 99% sequence identity to SEQ ID NO: 23.

[0299] C. Lipid Bilayer

[0300] In some embodiments, the targeted lipid particle includes a naturally derived bilayer of amphipathic lipids that encloses lumen or cavity. In some embodiments, the targeted lipid particle comprises a lipid bilayer as the outermost surface. In some embodiments, the lipid bilayer encloses a lumen. In some embodiments, the lumen is aqueous. In some embodiments, the lumen is in contact with the hydrophilic head groups on the interior of the lipid bilayer. In some embodiments, the lumen is a cytosol. In some embodiments, the cytosol contains cellular components present in a source cell. In some embodiments, the cytosol does not contain components present in a source cell. In some embodiments, the lumen is a cavity. In some embodiments, the cavity contains an aqueous environment. In some embodiments, the cavity does not contain an aqueous environment.

[0301] In some aspects, the lipid bilayer is derived from a source cell during a process to produce a lipid-containing particle. Exemplary methods for producing lipid-containing particles are provided in Section I.E. In some embodiments, the lipid bilayer includes membrane components of the cell from which the lipid bilayer is produced, e.g., phospholipids, membrane proteins, etc. In some embodiments, the lipid bilayer includes a cytosol that includes components found in the cell from which the micro-vesicle is produced, e.g., solutes, proteins, nucleic acids, etc., but not all of the components of a cell, e.g., they lack a nucleus. In some embodiments, the lipid bilayer is considered to be exosome-like. The lipid bilayer may vary in size, and in some instances have a diameter ranging from 30 and 300 nm, such as from 30 and 150 nm, and including from 40 to 100 nm.

[0302] In some embodiments, the lipid bilayer is a viral envelope. In some embodiments, the viral envelope is obtained from a source cell. In some embodiments, the viral envelope is obtained by the viral capsid from the source cell plasma membrane. In some embodiments, the lipid bilayer is obtained from a membrane other than the plasma membrane of a host cell. In some embodiments, the viral envelope lipid bilayer is embedded with viral proteins, including viral glycoproteins.

[0303] In other aspects, the lipid bilayer includes synthetic lipid complex. In some embodiments, the synthetic lipid complex is a liposome. In some embodiments, the lipid bilayer is a vesicular structure characterized by a phospholipid bilayer membrane and an inner aqueous medium. In some embodiments, the lipid bilayer has multiple lipid layers separated by aqueous medium. In some embodiments, the lipid bilayer forms spontaneously when phospholipids are suspended in an excess of aqueous solution. In some examples, the lipid components undergo self-rearrangement before the formation of closed structures and entrap water and dissolved solutes between the lipid bilayers.

[0304] In some embodiments, a targeted envelope protein and fusogen, such as any described above including any that are exogenous or overexpressed relative to the source cell, is disposed in the lipid bilayer.

[0305] In some embodiments, the targeted lipid particle comprises several different types of lipids. In some embodiments, the lipids are amphipathic lipids. In some embodiments, the amphipathic lipids are phospholipids. In some embodiments, the phospholipids comprise phosphatidylcholine, phosphatidylethanolamine, phosphatidylinositol, and phosphatidylserine. In some embodiments, the lipids comprise phospholipids such as phosphocholines and phosphoinositols. In some embodiments, the lipids comprise DMPC, DOPC, and DSPC.

[0306] In some embodiments, the bilayer may be comprised of one or more lipids of the same or different type. In some embodiments, the source cell comprises a cell selected from CHO cells, BHK cells, MDCK cells, C3H 10T1/2 cells, FLY cells, Psi-2 cells, BOSC 23 cells, PA317 cells, WEHI cells, COS cells, BSC 1 cells, BSC 40 cells, BMT 10 cells, VERO cells, W138 cells, MRCS cells, A549 cells, HT1080 cells, 293 cells, 293T cells, B-50 cells, 3T3 cells, NIH3T3 cells, HepG2 cells, Saos-2 cells, Huh7 cells, HeLa cells, W163 cells, 211 cells, and 211A cells.

[0307] D. Exogenous Agent

[0308] In embodiments, the targeted lipid particle, such as a lentiviral vector, further comprises an agent that is exogenous relative to the source cell (hereinafter also called “cargo” or “payload”). In some embodiments, the exogenous agent is a protein or a nucleic acid (e.g., a DNA, a chromosome (e.g. a human artificial chromosome), an RNA, e.g., an mRNA or miRNA). In some embodiments, the exogenous agent is a nucleic acid that encodes a protein. The protein can be any protein as is desired for targeted delivery to a target cell. In some embodiments, the protein is a therapeutic agent or a diagnostic agent. In some embodiments, the protein is an antigen receptor for targeting cells expressed by or associated with a disease or condition, for instance a chimeric antigen receptor (CAR) or a T cell receptor (TCR). Reference to the coding sequence of a nucleic acid encoding the protein also is referred to herein as a payload gene. In some embodiments, the exogenous agent or the nucleic acid encoding the exogenous agent are present in the lumen of the non-cell particle.

[0309] In some embodiments, the exogenous agent or cargo comprises or encodes a cytosolic protein. In some embodiments the exogenous agent or cargo comprises or encodes a membrane protein. In some embodiments, the exogenous agent or cargo comprises or encodes a therapeutic agent. In some embodiments, the therapeutic agent is chosen from one or more of a protein, e.g., an enzyme, a transmembrane protein, a receptor, an antibody; a nucleic acid, e.g., DNA, a chromosome (e.g. a human artificial chromosome), RNA, mRNA, siRNA, miRNA, or a small molecule.

[0310] In embodiments, the exogenous agent is present at least, or no more than, 10, 20, 50, 100, 200, 500, 1,000, 2,000, 5,000, 10,000, 20,000, 50,000, 100,000, 200,000, 500,000, 1,000,000, 5,000,000, 10,000,000, 50,000,000, 100,000,000, 500,000,000, or 1,000,000,000 copies. In embodiments, the targeted lipid particle has an altered, e.g., increased or decreased level of one or more endogenous molecule, e.g., protein or nucleic acid (e.g., in some embodiments, endogenous relative to the source cell, and in some embodiments, endogenous relative to the target cell), e.g., due to treatment of the source cell, e.g., mammalian source cell with a siRNA or gene editing enzyme. In embodiments, the endogenous molecule is present at least, or no more than, 10, 20, 50, 100, 200, 500, 1,000, 2,000, 5,000, 10,000, 20,000, 50,000, 100,000, 200,000, 500,000, 1,000,000, 5,000,000, 10,000,000, 50,000,000, 100,000,000, 500,000,000, or 1,000,000,000 copies. In embodiments, the endogenous molecule (e.g., an RNA or protein) is present at a concentration of at least 1, 2, 3, 4, 5, 10, 20, 50, 100, 500, 10³, 5.0×10³, 10⁴, 5.0×10⁴, 10⁵, 5.0×10⁵, 10⁶, 5.0×10⁶, 1.0×10⁷, 5.0×10⁷, or 1.0×10⁸, greater than its concentration in the source cell. In embodiments, the endogenous molecule (e.g., an RNA or protein) is present at a concentration of at least 1, 2, 3, 4, 5, 10, 20, 50, 100, 500, 10³, 5.0×10³, 10⁴, 5.0×10⁴, 10⁵, 5.0×10⁵, 10⁶, 5.0×10⁶, 1.0×10⁷, 5.0×10⁷, or 1.0×10⁸ less than its concentration in the source cell.

[0311] In some embodiments, the targeted lipid particle delivers to a target cell at least 10%, 20%, 30%, 40%, 50%, 60%, 70%, 80%, 90%, 95%, 96%, 97%, 98%, or 99% of the cargo (e.g., a therapeutic agent, e.g., an exogenous therapeutic agent) comprised by the fusosome. In some embodiments, the targeted lipid particle that fuses with the target cell(s) delivers to the target cell an average of at least 10%, 20%, 30%, 40%, 50%, 60%, 70%, 80%, 90%, 95%, 96%, 97%, 98%, or 99% of the cargo (e.g., a therapeutic agent, e.g., an exogenous therapeutic agent) comprised by the lipid particles that fuse with the target cell(s). In some embodiments, the targeted lipid particle composition delivers to a target tissue at least 10%, 20%, 30%, 40%, 50%, 60%, 70%, 80%, 90%, 95%, 96%, 97%, 98%, or 99% of the cargo (e.g., a therapeutic agent, e.g., an exogenous therapeutic agent) comprised by the targeted lipid particle compositions.

[0312] In some embodiments, the exogenous agent or cargo is not expressed naturally in the cell from which the targeted lipid particle is derived. In some embodiments, the exogenous agent or cargo is expressed naturally in the cell from which the targeted lipid particle is derived. In some embodiments, the exogenous agent or cargo is loaded into the targeted lipid particle via expression in the cell from which the lipid particle is derived (e.g. expression from DNA or mRNA introduced via transfection, transduction, or electroporation). In some embodiments, the exogenous agent or cargo is expressed from DNA integrated into the genome or maintained episosomally. In some embodiments, expression of the exogenous agent or cargo is constitutive. In some embodiments, expression of the exogenous agent or cargo is induced. In some embodiments, expression of the exogenous agent or cargo is induced immediately prior to generating the targeted lipid particle. In some embodiments, expression of the exogenous agent or cargo is induced at the same time as expression of the fusogen.

[0313] In some embodiments, the exogenous agent or cargo is loaded into the lipid particle via electroporation into the lipid particle itself or into the cell from which the fusosome is derived. In some embodiments, the exogenous agent or cargo is loaded into the lipid particle via transfection (e.g., of a DNA or mRNA encoding the cargo) into the lipid particle itself or into the cell from which the lipid particle is derived.

[0314] In some embodiments, the exogenous agent or cargo may include one or more nucleic acid sequences, one or more polypeptides, a combination of nucleic acid sequences and/or polypeptides, one or more organelles, and any combination thereof. In some embodiments, the exogenous agent or cargo may include one or more cellular components. In some embodiments, the exogenous agent or cargo includes one or more cytosolic and/or nuclear components.

[0315] In some embodiments, the exogenous agent or cargo includes a nucleic acid, e.g., DNA, nDNA (nuclear DNA), mtDNA (mitochondrial DNA), protein coding DNA, gene, operon, chromosome, genome, transposon, retrotransposon, viral genome, intron, exon, modified DNA, mRNA (messenger RNA), tRNA (transfer RNA), modified RNA, microRNA, siRNA (small interfering RNA), tmRNA (transfer messenger RNA), rRNA (ribosomal RNA), mtRNA (mitochondrial RNA), snRNA (small nuclear RNA), small nucleolar RNA (snoRNA), SmY RNA (mRNA trans-splicing RNA), gRNA (guide RNA), TERC (telomerase RNA component), aRNA (antisense RNA), cis-NAT (Cis-natural antisense transcript), CRISPR RNA (crRNA), IncRNA (long noncoding RNA), piRNA (piwi-interacting RNA), shRNA (short hairpin RNA), tasiRNA (trans-acting siRNA), eRNA (enhancer RNA), satellite RNA, pcRNA (protein coding RNA), dsRNA (double stranded RNA), RNAi (interfering RNA), circRNA (circular RNA), reprogramming RNAs, aptamers, and any combination thereof. In some embodiments, the nucleic acid is a wild-type nucleic acid. In some embodiments, the protein is a mutant nucleic acid. In some embodiments the nucleic acid is a fusion or chimera of multiple nucleic acid sequences.

[0316] In some embodiments, the exogenous agent or cargo may include a nucleic acid. For example, the exogenous agent or cargo may comprise RNA to enhance expression of an endogenous protein, or a siRNA or miRNA that inhibits protein expression of an endogenous protein. For example, the endogenous protein may modulate structure or function in the target cells. In some embodiments, the cargo may include a nucleic acid encoding an engineered protein that modulates structure or function in the target cells. In some embodiments, the exogenous agent or cargo is a nucleic acid that targets a transcriptional activator that modulate structure or function in the target cells.

[0317] In some embodiments, the exogenous agent or cargo is or encodes a polypeptide, e.g., enzymes, structural polypeptides, signaling polypeptides, regulatory polypeptides, transport polypeptides, sensory polypeptides, motor polypeptides, defense polypeptides, storage polypeptides, transcription factors, antibodies, cytokines, hormones, catabolic polypeptides, anabolic polypeptides, proteolytic polypeptides, metabolic polypeptides, kinases, transferases, hydrolases, lyases, isomerases, ligases, enzyme modulator polypeptides, protein binding polypeptides, lipid binding polypeptides, membrane fusion polypeptides, cell differentiation polypeptides, epigenetic polypeptides, cell death polypeptides, nuclear transport polypeptides, nucleic acid binding polypeptides, reprogramming polypeptides, DNA editing polypeptides, DNA repair polypeptides, DNA recombination polypeptides, transposase polypeptides, DNA integration polypeptides, targeted endonucleases (e.g. Zinc-finger nucleases, transcription-activator-like nucleases (TALENs), cas9 and homologs thereof), recombinases, and any combination thereof. In some embodiments the protein targets a protein in the cell for degradation. In some embodiments the protein targets a protein in the cell for degradation by localizing the protein to the proteasome. In some embodiments, the protein is a wild-type protein. In some embodiments, the protein is a mutant protein. In some embodiments the protein is a fusion or chimeric protein.

[0318] In some embodiments, the exogenous agent or cargo is a small molecule, e.g., ions (e.g. Ca²⁺, Cl-, Fe²⁺), carbohydrates, lipids, reactive oxygen species, reactive nitrogen species, isoprenoids, signaling molecules, heme, polypeptide cofactors, electron accepting compounds, electron donating compounds, metabolites, ligands, and any combination thereof. In some embodiments the small molecule is a pharmaceutical that interacts with a target in the cell. In some embodiments the small molecule targets a protein in the cell for degradation. In some embodiments the small molecule targets a protein in the cell for degradation by localizing the protein to the proteasome. In some embodiments that small molecule is a proteolysis targeting chimera molecule (PROTAC).

[0319] In some embodiments, the exogenous agent or cargo includes a mixture of proteins, nucleic acids, or metabolites, e.g., multiple polypeptides, multiple nucleic acids, multiple small molecules; combinations of nucleic acids, polypeptides, and small molecules; ribonucleoprotein complexes (e.g. Cas9-gRNA complex); multiple transcription factors, multiple epigenetic factors, reprogramming factors (e.g. Oct4, Sox2, cMyc, and Klf4); multiple regulatory RNAs; and any combination thereof.

[0320] In some embodiments, the exogenous agent or cargo includes one or more organelles, e.g., chondrisomes, mitochondria, lysosomes, nucleus, cell membrane, cytoplasm, endoplasmic reticulum, ribosomes, vacuoles, endosomes, spliceosomes, polymerases, capsids, acrosome, autophagosome, centriole, glycosome, glyoxysome, hydrogenosome, melanosome, mitosome, myofibril, cnidocyst, peroxisome, proteasome, vesicle, stress granule, networks of organelles, and any combination thereof.

[0321] In some embodiments, the exogenous agent is or encodes a cytosolic protein, e.g., a protein that is produced in the recipient cell and localizes to the recipient cell cytoplasm. In some embodiments, the exogenous agent is or encodes a secreted protein, e.g., a protein that is produced and secreted by the recipient cell. In some embodiments, the exogenous agent is or encodes a nuclear protein, e.g., a protein that is produced in the recipient cell and is imported to the nucleus of the recipient cell. In some embodiments, the exogenous agent is or encodes an organellar protein (e.g., a mitochondrial protein), e.g., a protein that is produced in the recipient cell and is imported into an organelle (e.g., a mitochondrial) of the recipient cell. In some embodiments, the protein is a wild-type protein or a mutant protein. In some embodiments the protein is a fusion or chimeric protein.

[0322] In some embodiments, the exogenous agent is capable of being delivered to a hepatocyte or liver cell. In some embodiments, the exogenous agents or cargo can be delivered to treat a disease or disorder in a hepatocyte or liver cell.

[0323] In some embodiments, the exogenous agent is encoded by a gene from among OTC, CPS1, NAGS, BCKDHA, BCKDHB, DBT, DLD, MUT, MMAA, MMAB, MMACHC, MMADHC, MCEE, PCCA, PCCB, UGT1A1, ASS1, PAH, PAL, ATP8B1, ABCB11, ABCB4, TJP2, IVD, GCDH, ETFA, ETFB, ETFDH, ASL, D2HGDH, HMGCL, MCCC1, MCCC2, ABCD4, HCFC1, LNBRD1, ARG1, SLC25A15, SLC25A13, ALAD, CPDX, HMBS, PPDX, BTD, HLCS, PC, SLC7A7, CPT2, ACADM, ACADS, ACADVL, AGL, G6PC, GBE1, PHKA1, PHKA2, PHKB, PHKG2, SLC37A4, PMM2, CBS, FAH, TAT, GALT, GALK1, GALE, G6PD, SLC3A1, SLC7A9, MTHFR, MTR, MTRR, ATP7B, HPRT1, HJV, HAMP, JAG1, TTR, AGXT, LIPA, SERPING1, HSD17B4, UROD, HFE, LPL, GRHPR, HOGA1, LDLR, ACAD8, ACADSB, ACAT1, ACSF3, ASPA, AUH, DNAJC19, ETHE1, FBP1, FTCD, GSS, HIBCH, IDH2, L2HGDH, MLYCD, OPA3, OPLAH, OXCT1, POLG, PPM1K, SERAC1, SLC25A1, SUCLA2, SUCLG1, TAZ, AGK, CLPB, TMEM70, ALDH18A1, OAT, CASA, GLUD1, GLUL, UMPS, SLC22A5, CPT1A, HADHA, HADH, SLC52A1, SLC52A2, SLC52A3, HADHB, GYS2, PYGL, SLC2A2, ALG1, ALG2, ALG3, ALG6, ALG8, ALG9, ALG11, ALG12, ALG13, ATP6V0A2, B3GLCT, CHST14, COG1, COG2, COG4, COG5, COG6, COG7, COG8, DOLK, DHDDS, DPAGT1, DPM1, DPM2, DPM3, G6PC3, GFPT1, GMPPA, GMPPB, MAGT1, MAN1B1, MGAT2, MOGS, MPDU1, MPI, NGLY1, PGM1, PGM3, RFT1, SEC23B, SLC35A1, SLC35A2, SLC35C1, SSR4, SRD5A3, TMEM165, TRIP11, TUSC3, ALG14, B4GALT1, DDOST, NUS1, RPN2, SEC23A, SLC35A3, ST3GAL3, STT3A, STT3B, AGA, ARSA, ARSB, ASAH1, ATP13A2, CLN3, CLNS, CLN6, CLN8, CTNS, CTSA, CTSD, CTSF, CTSK, DNAJCS, FUCA1, GAA, GALC, GALNS, GLA, GLB1, GM2A, GNPTAB, GNPTG, GNS, GRN, GUSB, HEXA, HEXB, HGSNAT, HYAL1, IDS, IDUA, KCTD7, LAMP2, MAN2B1, MANBA, MCOLN1, MFSD8, NAGA, NAGLU, NEU1 NPC1, NPC2, SGSH, PPT1, PSAP, SLC17A5, SMPD1, SUMF1, TPP1, AHCY, GNMT, MAT1A, GCH1, PCBD1, PTS, QDPR, SPR, DNAJC12, ALDH4A1, PRODH, HPD, GBA, HGD, AMN, CD320, CUBN, GIF, TCN1, TCN2, PREPL, PHGDH, PSAT1, PSPH, AMT, GCSH, GLDC, LIAS, NFU1, SLC6A9, SLC2A1, ATP7A, AP1S1, CP, SLC33A1, PEX7 PHYH, AGPS, GNPAT, ABCD1, ACOX1, PEX1, PEX2, PEX3, PEXS, PEX6, PEX10, PEX12, PEX13, PEX14, PEX16, PEX19, PEX26, AMACR, ADA, ADSL, AMPD1, GPHN, MOCOS, MOCS1, PNP, XDH, SUOX, OGDH, SLC25A19, DHTKD1, SLC13A5, FH, DLAT, MPC1, PDHA1, PDHB, PDHX, PDP1, ABCC2, SLCO1B1, SLCO1B3, HFE2, ADAMTS13, PYGM, COL1A2, TNFRSF11B, TSC1, TSC2, DHCR7, PGK1, VLDLR, KYNU, F5, C3, COL4A1, CFH, SLC12A2, GK, SFTPC, CRTAP, P3H1, COL7A1, PKLR, TALDO1, TF, EPCAM, VHL, GC, SERPINA1, ABCC6, F8, F9, ApoB, PCSK9, LDLRAP1, ABCGS, ABCG8, LCAT, SPINKS, or GNE.

[0324] In some embodiments, the exogenous agent is encoded by a gene from among OTC, CPS1, NAGS, BCKDHA, BCKDHB, DBT, DLD, MUT, MMAA, MMAB, MMACHC, MMADHC, MCEE, PCCA, PCCB, UGT1A1, ASS1, PAL, PAH, ATP8B1, ABCB11, ABCB4, TJP2, IVD, GCDH, ETFA, ETFB, ETFDH, ASL, D2HGDH, HMGCL, MCCC1, MCCC2, ABCD4, HCFC1, LMBRD1, ARG1, SLC25A15, SLC25A13, ALAD, CPDX, HMBS, PPDX, BTD, HLCS, PC, SLC7A7, CPT2, ACADM, ACADS, ACADVL, AGL, G6PC, GBE1, PHKA1, PHKA2, PHKB, PHKG2, SLC37A4, PMM2, CBS, FAH, TAT, GALT, GALK1, GALE, G6PD, SLC3A1, SLC7A9, MTHFR, MTR, MTRR, ATP7B, HPRT1, HJV, HAMP, JAG1, TTR, AGXT, LIPA, SERPING1, HSD17B4, UROD, HFE, LPL, GRHPR, HOGA1, or LDLR. In some embodiments, the exogenous agent is the enzyme phenylalanine ammonia lyase (PAL).

[0325] In some embodiments, the exogenous agents or cargo can be delivered to treat and disease or indication listed in Table 5. In some embodiments, the indications are specific for a liver cell or hepatocyte.

[0326] In some embodiments, the exogenous agent comprises a protein of Table 5 below. In some embodiments, the exogenous agent comprises the wild-type human sequence of any of the proteins of Table 5, a functional fragment thereof (e.g., an enzymatically active fragment thereof), or a functional variant thereof. In some embodiments, the exogenous agent comprises an amino acid sequence having at least 70%, 75%, 80%, 85%, 90%, 95%, 96%, 97%, 98%, or 99%, identity to an amino acid sequence of Table 5, e.g., a Uniprot Protein Accession Number sequence of column 4 of Table 5 or an amino acid sequence of column 5 of Table 5. In some embodiments, the payload gene encoding an exogenous agent encodes an amino acid sequence having at least 70%, 75%, 80%, 85%, 90%, 95%, 96%, 97%, 98%, or 99%, identity to an amino acid sequence of Table 5. In some embodiments, the payload gene encoding an exogenous agent has a nucleic acid sequence having at least 70%, 75%, 80%, 85%, 90%, 95%, 96%, 97%, 98%, or 99%, identity to a nucleic acid sequence of Table 5, e.g., an Ensemble Gene Accession Number of column 3 of Table 5.

TABLE 5
The first column lists exogenous agents that can be delivered to treat the indications in the sixth column, according to the
methods and uses herein. Each Uniprot accession number of Table 5 is herein incorporated by reference in its entirety.

| | | Ensembl | | Amino Acid | | |
|---|---|---|---|---|---|---|
| | | Gene(s) | | Sequence | | |
| | | Accession | Uniprot | (first Uniprot | | |
| | Entrez | Number | Protein(s) | Accession | | |
| | Accession | (ENSG0000 + | Accession | Number) | | |
| Gene | Number | number shown) | Number | SEQ ID NO | Disease/Disorder | Category |
| OTC | 5009 | 0036473 | P00480 | 61 | ornithine | Urea cycle disorder |
| | | | | | transcarbamylase | |
| | | | | | (OTC) deficiency | |
| CPS1 | 1373 | 0021826 | P31327, | 62 | carbamoyl | Urea cycle disorder |
| | | | Q6PEK7, | | phosphate | |
| | | | B7ZAW0, | | synthetase I | |
| | | | A0A024R454 | | (CPSI) deficiency | |
| NAGS | 162417 | 0161653 | Q8N159, | 63 | N-acetylglutamate | Urea cycle disorder |
| | | | Q2NKP2 | | synthase (NAGS) | |
| | | | | | deficiency | |
| BCKDHA | 593 | 0248098 | A0A024R0K3, | 64 | maple syrup urine | Organic acidemia |
| | | | P12694, | | disease (MSUD); | |
| | | | Q59EI3 | | Classic Maple | |
| | | | | | Syrup Urine | |
| | | | | | Disease (CMSUD) | |
| BCKDHB | 594 | 0083123 | A0A140VKB3, | 65 | maple syrup urine | Organic acidemia |
| | | | P21953, | | disease (MSUD); | |
| | | | B4E2N3, | | Classic Maple | |
| | | | B7ZB80 | | Syrup Urine | |
| | | | | | Disease (CMSUD) | |
| DBT | 1629 | 0137992 | P11182 | 66 | maple syrup urine | Organic acidemia |
| | | | | | disease (MSUD); | |
| | | | | | Classic Maple | |
| | | | | | Syrup Urine | |
| | | | | | Disease (CMSUD) | |
| DLD | 1738 | 0091140 | A0A024R713, | 67 | maple syrup urine | Urea cycle disorder |
| | | | P09622, | | disease (MSUD) | |
| | | | E9PEX6 | | Dihydrolipoamide | |
| | | | | | dehydrogenase | |
| | | | | | deficiency | |
| MUT | 4594 | 0146085 | A0A024RD82, | 68 | methylmalonic | Organic acidemia |
| | | | B2R6K1, | | acidemia due to | |
| | | | P22033 | | methylmalonyl- | |
| | | | | | CoA mutase | |
| | | | | | deficiency | |
| MMAA | 166785 | 0151611 | Q8IVH4 | 69 | cobalamin A | Organic acidemia |
| | | | | | deficiency | |
| | | | | | (methylmalonic | |
| | | | | | acidemia) | |
| MMAB | 326625 | 0139428 | Q96EY8 | 70 | cobalamin B | Organic acidemia |
| | | | | | deficiency | |
| | | | | | (methylmalonic | |
| | | | | | acidemia) | |
| MMACHC | 25974 | 0132763 | A0A0C4DGU2, | 71 | cobalamin C | Organic acidemia |
| | | | Q9Y4U1 | | deficiency | |
| | | | | | (methylmalonic | |
| | | | | | acidemia); | |
| | | | | | Methylmalonic | |
| | | | | | Acidemia with | |
| | | | | | Homocystinuria | |
| MMADHC | 27249 | 0168288 | Q9H3L0 | 72 | cobalamin D | Organic acidemia |
| | | | | | deficiency | |
| | | | | | (methylmalonic | |
| | | | | | acidemia); | |
| | | | | | Methylmalonic | |
| | | | | | Acidemia with | |
| | | | | | Homocystinuria; | |
| | | | | | Homocystinuria; | |
| | | | | | Cobalamin C | |
| | | | | | Deficiency | |
| MCEE | 84693 | 0124370 | Q96PE7 | 73 | methylmalonic | Organic acidemia |
| | | | | | acidemia; | |
| | | | | | Cobalamin D | |
| | | | | | Deficiency | |
| PCCA | 5095 | 0175198 | P05165 | 74 | propionic acidemia | Organic acidemia |
| PCCB | 5096 | 0114054 | P05166 | 75 | propionic acidemia | Organic acidemia |
| UGT1A1 | 54658 | 0241635 | P22309, | 76 | Crigler-Najjar | |
| | | | Q5DT03 | | syndrome type 1 | |
| | | | | | Crigler-Najjar | |
| | | | | | syndrome type 2, | |
| | | | | | Gilbert syndrome | |
| ASS1 | 445 | 0130707 | P00966, | 77 | citrullinemia type I | Urea cycle disorder |
| | | | Q5T6L4 | | | |
| PAH | 5053 | 0171759 | A0A024RBG4, | 78 | Phenylalanine | Aminoacidopathy |
| | | | P00439 | | hydroxylase | |
| | | | | | deficiency | |
| PAL | | | | 79 | Phenylalanine | Aminoacidopathy |
| | | | | | hydroxylase | |
| | | | | | deficiency | |
| ATP8B1 | 5205 | 0081923 | O43520 | 80 | Progressive | |
| | | | | | familial | |
| | | | | | intrahepatic | |
| | | | | | cholestasis Type 1 | |
| ABCB11 | 8647 | 0073734, | O95342 | 81 | Progressive | |
| | | 0276582 | | | familial | |
| | | | | | intrahepatic | |
| | | | | | cholestasis Type 2; | |
| | | | | | Progressive | |
| | | | | | Familial | |
| | | | | | Intrahepatic | |
| | | | | | Cholestasis Type 3 | |
| ABCB4 | 5244 | 0005471 | P21439 | 82 | Progressive | |
| | | | | | familial | |
| | | | | | intrahepatic | |
| | | | | | cholestasis Type 3; | |
| | | | | | Progressive | |
| | | | | | Familial | |
| | | | | | Intrahepatic | |
| | | | | | Cholestasis Type 2 | |
| TJP2 | 9414 | 0119139 | B7Z2R3, | 83 | Progressive | |
| | | | Q9UDY2, | | familial | |
| | | | B7Z954 | | intrahepatic | |
| | | | | | cholestasis Type 4 | |
| IVD | 3712 | 0128928 | P26440, | 84 | isovaleric | Organic acidemia |
| | | | A0A0A0MT83 | | acidemia (IVD) | |
| GCDH | 2639 | 0105607 | A0A024R7F9, | 85 | glutaric acidemia | Organic acidemia |
| | | | Q92947 | | type I | |
| ETFA | 2108 | 0140374 | A0A0S2Z3L0, | 86 | multiple acyl-CoA | Organic acidemia |
| | | | P13804 | | dehydrogenase | |
| | | | | | deficiency (a.k.a. | |
| | | | | | glutaric aciduria | |
| | | | | | type II) | |
| ETFB | 2109 | 0105379 | P38117 | 87 | multiple acyl-CoA | Organic acidemia |
| | | | | | dehydrogenase | |
| | | | | | deficiency (a.k.a. | |
| | | | | | glutaric aciduria | |
| | | | | | type II) | |
| ETFDH | 2110 | 0171503 | B4DEQ0, | 88 | multiple acyl-CoA | Organic acidemia |
| | | | Q16134 | | dehydrogenase | |
| | | | | | deficiency (a.k.a. | |
| | | | | | glutaric aciduria | |
| | | | | | type II) | |
| ASL | 435 | 0126522 | A0A024RDL8, | 89 | argininosuccinate | Urea cycle disorder |
| | | | P04424, | | lyase (ASL) | |
| | | | A0A0S2Z316 | | deficiency | |
| D2HGDH | 728294 | 0180902 | B3KSR6, | 90 | D-2- | Organic acidemia |
| | | | B4E3K7, | | hydroxyglutaric | |
| | | | B5MCV2, | | aciduria type I | |
| | | | Q8N465 | | | |
| HMGCL | 3155 | 0117305 | P35914 | 91 | 3-hydroxy-3- | Organic academia |
| | | | | | methylglutaryl- | Urea cycle disorder |
| | | | | | CoA lyase | |
| | | | | | (3HMG) | |
| | | | | | deficiency | |
| MCCC1 | 56922 | 0078070 | Q68D27, | 92 | 3-methylcrotonyl- | Organic acidemia |
| | | | Q96RQ3, | | CoA carboxylase | |
| | | | A0A0S2Z693, | | (3MCC) | |
| | | | E9PHF7 | | deficiency | |
| MCCC2 | 64087 | 0131844, | A0A140VK29, | 93 | 3-methylcrotonyl- | Organic acidemia |
| | | 0281742, | Q9HCC0 | | CoA carboxylase | |
| | | 0275300 | | | (3MCC) | |
| | | | | | deficiency | |
| ABCD4 | 5826 | 0119688 | A0A024R6B9, | 94 | methylmalonic | Organic acidemia |
| | | | O14678, | | acidemia with | |
| | | | A0A024R6C8 | | homocystinuria | |
| HCFC1 | 3054 | 0172534 | P51610, | 95 | methylmalonic | Organic acidemia |
| | | | A6NEM2 | | acidemia with | |
| | | | | | homocystinuria | |
| LMBRD1 | 55788 | 0168216 | Q9NUN5 | 96 | methylmalonic | Organic acidemia |
| | | | | | acidemia with | |
| | | | | | homocystinuria | |
| ARG1 | 383 | 0118520 | P05089 | 97 | arginase (ARG1) | Urea cycle disorder |
| | | | | | deficiency | |
| SLC25A15 | 10166 | 0102743 | Q9Y619 | 98 | hyperammonemia- | Urea cycle disorder |
| | | | | | hyperornithinemia- | |
| | | | | | homocitrullinuria | |
| | | | | | (HHH) syndrome | |
| SLC25A13 | 10165 | 0004864 | Q9UJS0 | 99 | citrin deficiency | Urea cycle disorder |
| | | | | | citrullinemia type | |
| | | | | | II | |
| ALAD | 210 | 0148218 | P13716 | 100 | Acute Hepatic | Porphyria |
| | | | | | porphyria | |
| CPOX | 1371 | 0080819 | P36551 | 101 | Acute Hepatic | Porphyria |
| | | | | | porphyria | |
| HMBS | 3145 | 0256269, | P08397 | 102 | Acute Hepatic | Porphyria |
| | | 0281702 | | | porphyria; | |
| | | | | | Acute Intermittent | |
| | | | | | Porphyria | |
| PPOX | 5498 | 0143224 | P50336, | 103 | Acute Hepatic | Porphyria |
| | | | B4DY76 | | porphyria | |
| BTD | 686 | 0169814 | P43251 | 104 | Biotinidase | Organic acidemia |
| | | | | | Deficiency | |
| HLCS | 3141 | 0159267 | P50747 | 105 | Holocarboxylase | Organic acidemia |
| | | | | | Synthetase | |
| | | | | | Deficiency | |
| PC | 5091 | 0173599 | P11498 | 106 | Pyruvate | Urea cycle disorder |
| | | | A0A024R5C5 | | Carboxylase | |
| | | | | | Deficiency | |
| SLC7A7 | 9056 | 0155465 | Q9UM01 | 107 | Lysinuric Protein | Urea cycle disorder |
| | | | A0A0S2Z502 | | Intolerance | |
| CPT2 | 1376 | 0157184 | P23786 | 108 | Carnitine | Fatty Acid Oxidation |
| | | | A0A140VK13 | | Palmitoyltransferase | |
| | | | A0A1B0GTB8 | | Type II (CPT II) | |
| | | | | | Deficiency | |
| ACADM | 34 | 0117054 | P11310 | 109 | Medium Chain | Fatty Acid Oxidation |
| | | | A0A0S2Z366, | | Acyl-CoA | |
| | | | B7Z911, | | Dehydrogenase | |
| | | | Q5HYG7, | | (MCAD) | |
| | | | Q5T4U5, | | Deficiency | |
| | | | B4DJE7 | | | |
| ACADS | 35 | 0122971 | P16219 | 110 | Short Chain Acyl- | Fatty acid oxidation |
| | | | E5KSD5, | | CoA (SCAD) | |
| | | | B4DUH1, | | Dehydrogenase | |
| | | | E9PE82 | | Deficiency | |
| ACADVL | 37 | 0072778 | P49748 | 111 | Very Long Chain | Fatty acid oxidation |
| | | | B3KPA6 | | Acyl-CoA | |
| | | | | | Dehydrogenase | |
| | | | | | (VLCAD) | |
| | | | | | Deficiency | |
| AGL | 178 | 0162688 | P35573 | 112 | GSD III (Cori/ | Liver glycogen storage |
| | | | A0A0S2A4E4 | | Forbe Disease or | disorder |
| | | | | | Debrancher) | |
| G6PC | 2538 | 0131482 | P35575 | 113 | GSDIa (Von | Liver glycogen storage |
| | | | | | Gierke Disease) | disorder |
| GBE1 | 2632 | 0114480 | Q04446 | 114 | GSD IV (Andersen | Liver glycogen storage |
| | | | Q59ET0 | | Disease, Brancher | disorder |
| | | | | | Enzyme) | |
| PHKA1 | 5255 | 0067177 | P46020 | 115 | GSD IXa | |
| PHKA2 | 0044446 | 5256 | P46019 | 116 | GSD IXa | Liver glycogen storage |
| | 5256 | 0044446 | | | | disorder |
| PHKB | 5257 | 0102893 | Q93100 | 117 | GSD IXb | Liver glycogen storage |
| | | | | | | disorder |
| PHKG2 | 5261 | 0156873 | P15735 | 118 | GSD IXc | Liver glycogen storage |
| | | | | | | disorder |
| SLC37A4 | 2542 | 0281500 | O43826 | 119 | GSDIb. c, d | Liver glycogen storage |
| | | 0137700 | A0A024R3H9, | | | disorder |
| | | | A8K0S7, | | | |
| | | | A0A024R3L1, | | | |
| | | | B4DUH2 | | | |
| PMM2 | 5373 | 0140650 | O15305, | 120 | PMM2-CDG | Glycosylation disorder |
| | | | A0A0S2Z4J6, | | | |
| | | | Q59F02 | | | |
| CBS | 102724560, | 0160200 | P35520, | 121 | Cystathionine | Aminoacidopathy |
| | 875 | | P0DN79, | | Beta-Synthase | |
| | | | Q9NTF0, | | Deficiency | |
| | | | B7Z2D6 | | (Classic | |
| | | | | | Homocystinuria); | |
| | | | | | Homocystinuria | |
| FAH | 2184 | 0103876 | P16930 | 122 | Tyrosinemia Type | Aminoacidopathy |
| | | | | | I | |
| TAT | 6898 | 0198650 | P17735, | 123 | Tyrosinemia Type | Aminoacidopathy |
| | | | A0A140VKB7 | | II | |
| | | | | | Tyrosinemia Type | |
| | | | | | III | |
| GALT | 2592 | 0213930 | P07902, | 124 | Galactosemia | Carbohydrate disorder |
| | | | A0A0S2Z3Y7, | | due to galactose-1- | |
| | | | B2RAT6 | | phosphate | |
| | | | | | uridylyltranserase | |
| | | | | | (GALT) | |
| | | | | | deficiency | |
| GALK1 | 2584 | 0108479 | P51570 | 125 | Galactosemia | Carbohydrate disorder |
| GALE | 2582 | 0117308 | Q14376 | 126 | Galactosemia | Carbohydrate disorder |
| G6PD | 2539 | 0160211 | P11413 | 127 | Glucose-6- | Carbohydrate disorder |
| | | | | | Phosphate | |
| | | | | | Dehydrogenase | |
| | | | | | (G6PD) | |
| | | | | | Deficiency | |
| SLC3A1 | 6519 | 0138079 | Q07837, | 128 | Cystinuria | Aminoacidopathy |
| | | | A0A0S2Z4E1, | | | |
| | | | B8ZZK1 | | | |
| SLC7A9 | 11136 | 0021488 | P82251 | 129 | Cystinuria | Aminoacidopathy |
| MTHFR | 4524 | 0177000 | P42898, | 130 | Homocystinuria | Aminoacidopathy |
| | | | Q59GJ6, | | | |
| | | | Q81U67 | | | |
| MTR | 4548 | 0116984 | Q99707 | 131 | Homocystinuria | Aminoacidopathy |
| MTRR | 4552 | 0124275 | Q9UBK8 | 132 | Homocystinuria | Aminoacidopathy |
| ATP7B | 540 | 0123191 | P35670, | 133 | Wilson Disease | Metal transport disorder |
| | | | A0A024RDX3, | | Copper | |
| | | | B7ZLR4, | | Metabolism | |
| | | | B7ZLR3, | | Disorder | |
| | | | E7ET55 | | | |
| HPRT1 | 3251 | 0165704 | P00492, | 134 | Lesch-Nyhan | Purine Metabolism |
| | | | A0A140VJL3 | | Syndrome | Disorder |
| | | | | | Purine Metabolism | |
| | | | | | Disorder | |
| HJV | 148738 | 0168509 | Q6ZVN8 | 135 | Hemochromatosis, | |
| | | | | | Type 2A | |
| HAMP | 57817 | 0105697 | P81172 | 136 | Hemochromatosis | |
| | | | | | Type 2B: Primary | |
| | | | | | Hemochromatosis | |
| JAG1 | 182 | 0101384 | P78504, | 137 | Alagille Syndrome | |
| | | | Q99740 | | 1 | |
| TTR | 7276 | 0118271 | P02766, | 138 | Familial TTR | |
| | | | E9KL36 | | Amyloidoisis; | |
| | | | | | Familial amyloid | |
| | | | | | polyneuropathy | |
| AGXT | 189 | 0172482 | P21549 | 139 | Primary | |
| | | | | | Hyperoxaluria | |
| | | | | | Type I | |
| LIPA | 3988 | 0107798 | P38571 | 140 | Lysosomal Acid | Lyososomal storage |
| | | | A0A0A0MT32 | | Lipase Deficiency | disorder |
| SERPING1 | 710 | 0149131 | P05155, | 141 | Hereditary | |
| | | | A0A0S2Z4J1, | | Angioedma | |
| | | | B2R659, | | | |
| | | | E7EWE5, | | | |
| | | | B3KSP2, | | | |
| | | | G5E9S2 | | | |
| HSD17B4 | 3295 | 0133835 | P51659 | 142 | D-Bifunctional | Peroxisomal disorders |
| | | | | | Protein Deficiency | |
| | | | | | X-linked | |
| | | | | | Adrenoleukodystrophy | |
| UROD | 7389 | 0126088 | P06132 | 143 | Porphyria Cutanea | |
| | | | | | Tarda | |
| HFE | 3077 | 0010704 | Q30201 | 144 | Porphyria Cutanea | |
| | | | | | Tarda | |
| LPL | 4023 | 0175445 | P06858, | 145 | Lipoprotein Lipase | |
| | | | A0A1B1RVA9 | | Deficiency | |
| | | | | | (“hyperlipoproteinemia | |
| | | | | | type Ia; | |
| | | | | | Buerger-Gruetz | |
| | | | | | syndrome, or | |
| | | | | | Familial | |
| | | | | | hyperchylomicronemia) | |
| GRHPR | 9380 | 0137106 | Q9UBQ7 | 146 | Primary | |
| | | | | | Hyperoxaluria | |
| | | | | | Type II | |
| HOGA1 | 112817 | 0241935 | Q86XE5 | 147 | Primary | |
| | | | | | Hyperoxaluria | |
| | | | | | Type III | |
| LDLR | 3949 | 0130164 | P01130, | 148 | Homozygous | |
| | | | A0A024R7D5 | | Familial | |
| | | | | | Hypercholesterolemia | |
| ACAD8 | 27034 | 0151498 | Q9UKU7 | 149 | isobutyryl-CoA | Organic acidemia |
| | | | | | dehydrogenase | |
| | | | | | (IBD) deficiency | |
| ACADSB | 36 | 0196177 | P45954, | 150 | short-branched | Organic acidemia |
| | | | A0A0S2Z3P9 | | chain acyl-CoA | |
| | | | | | dehydrogenase | |
| | | | | | (SBCAD) | |
| | | | | | deficiency | |
| ACAT1 | 38 | 0075239 | A0A140VJX1, | 151 | beta-ketothiolase | Organic acidemia |
| | | | P24752 | | deficiency | |
| ACSF3 | 197322 | 0176715 | Q4G176, | 152 | combined malonic | Organic acidemia |
| | | | F5H5A1 | | and methylmalonic | |
| | | | | | aciduria | |
| ASPA | 443 | 0108381 | P45381, | 153 | Canavan disease | Organic acidemia |
| | | | Q6FH48 | | | |
| AUH | 549 | 0148090 | Q13825, | 154 | 3- | Organic acidemia |
| | | | B4DYI6 | | methylglutaconic | |
| | | | | | acidemia type I | |
| DNAJC19 | 131118 | 0205981 | Q96DA6, | 155 | dilated | Organic acidemia |
| | | | A0A0S2Z5X1 | | cardiomyopathy | |
| | | | | | with ataxia | |
| | | | | | syndrome (causes | |
| | | | | | 3- | |
| | | | | | methylglutaconic | |
| | | | | | aciduria) | |
| ETHE1 | 23474 | 0105755 | A0A0S2Z580, | 156 | ethylmalonic | Organic acidemia |
| | | | O95571, | | encephalopathy | |
| | | | A0A0S2Z5N8, | | | |
| | | | A0A0S2Z5B3, | | | |
| | | | B2RCZ7 | | | |
| FBP1 | 2203 | 0165140 | P09467, | 157 | fructose 1,6- | Organic acidemia |
| | | | Q2TU34 | | Bisphosphatase | |
| | | | | | deficiency | |
| FTCD | 10841 | 0160282, | O95954 | 158 | glutamate | Organic acidemia |
| | | 0281775 | | | formiminotransferase | |
| | | | | | deficiency | |
| | | | | | (FIGLU | |
| GSS | 2937 | 0100983 | P48637, | 159 | glutathione | Organic acidemia |
| | | | V9HWJ1 | | synthetase | |
| | | | | | deficiency | |
| HIBCH | 26275 | 0198130 | A0A140VJL0, | 160 | 3- | Organic acidemia |
| | | | Q6NVY1 | | hyroxyisobutyryl- | |
| | | | | | CoA hydrolase | |
| | | | | | deficiency | |
| IDH2 | 3418 | 0182054 | P48735, | 161 | D-2- | Organic acidemia |
| | | | B4DSZ6 | | hydroxyglutaric | |
| | | | | | aciduria type II | |
| L2HGDH | 79944 | 0087299 | Q9H9P8 | 162 | L-2- | Organic acidemia |
| | | | | | hydroxyglutaric | |
| | | | | | aciduria | |
| MLYCD | 23417 | 0103150 | O95822 | 163 | malonic acidemia | Organic acidemia |
| OPA3 | 80207 | 0125741 | Q9H6K4, | 164 | Costeff syndrome/ | Organic acidemia |
| | | | B4DK77 | | 3- | |
| | | | | | methylglutaconic | |
| | | | | | aciduria type III | |
| OPLAH | 26873 | 0178814 | O14841 | 165 | 5-oxoprolinase | Organic acidemia |
| | | | | | deficiency | |
| OXCT1 | 5019 | 0083720 | A0A024R040, | 166 | SCOT deficiency | Organic acidemia |
| | | | P55809 | | | |
| POLG | 5428 | 0140521 | E5KNU5, | 167 | 3- | Organic acidemia |
| | | | P54098 | | methylglutaconic | |
| | | | | | aciduria | |
| PPM1K | 152926 | 0163644 | Q8N3J5 | 168 | maple syrup urine | Organic acidemia |
| | | | | | disease (MSUD), | |
| | | | | | variant type | |
| SERAC1 | 84947 | 0122335 | Q96JX3 | 169 | Megdel Syndrome | Organic acidemia |
| SLC25A1 | 6576 | 0100075 | D9HTE9, | 170 | D,L-2- | Organic acidemia |
| | | | B4DP62, | | hydroxyglutaric | |
| | | | P53007 | | aciduria | |
| SUCLA2 | 8803 | 0136143 | E5KS60, | 171 | succinate-CoA | Organic acidemia |
| | | | Q9P2R7, | | ligase deficiency, | |
| | | | Q9Y4T0 | | methylmalonic | |
| | | | | | aciduria | |
| SUCLG1 | 8802 | 0163541 | P53597 | 172 | succinate-CoA | Organic acidemia |
| | | | | | ligase deficiency, | |
| | | | | | methylmalonic | |
| | | | | | aciduria | |
| TAZ | 6901 | 0102125 | A0A0S2Z4K0, | 173 | Barth syndrome | Organic acidemia |
| | | | Q16635, | | | |
| | | | A6XNE1, | | | |
| | | | A0A0S2Z4E6, | | | |
| | | | A0A0S2Z4K9, | | | |
| | | | A0A0S2Z4F4 | | | |
| AGK | 55750 | 0006530, | A4D1U5, | 174 | 3- | Organic acidemia |
| | | 0262327 | Q53H12 | | methylglutaconic | |
| | | | | | aciduria | |
| CLPB | 81570 | 0162129 | Q9H078, | 175 | 3- | Organic acidemia |
| | | | A0A140VK11 | | methylglutaconic | |
| | | | | | aciduria | |
| TMEM70 | 54968 | 0175606 | Q9BUB7 | 176 | 3- | Organic acidemia |
| | | | | | methylglutaconic | |
| | | | | | aciduria | |
| ALDH18A1 | 5832 | 0059573 | P54886 | 177 | ALDH18A1- | Urea cycle disorder |
| | | | | | related cutis laxa | |
| OAT | 4942 | 0065154 | A0A140VJQ4, | 178 | gyrate atrophy | Urea cycle disorder |
| | | | P04181 | | (OAT) | |
| CA5A | 763 | 0174990 | P35218 | 179 | carbonic | Urea cycle disorder |
| | | | | | anhydrase | |
| | | | | | deficiency | |
| GLUD1 | 2746 | 0148672 | P00367, | 180 | glutamate | Urea cycle disorder |
| | | | E9KL48 | | dehydrogenase | |
| | | | | | deficiency | |
| GLUL | 2752 | 0135821 | A8YXX4, | 181 | glutamine | Urea cycle disorder |
| | | | P15104 | | synthetase | |
| | | | | | deficienc | |
| UMPS | 7372 | 0114491 | A8K5J1, | 182 | Orotic Aciduria | Urea cycle disorder |
| | | | P11172 | | | |
| SLC22A5 | 6584 | 0197375 | O76082 | 183 | carnitine- | Fatty acid oxidation |
| | | | | | acylcarnitine | |
| | | | | | translocase | |
| | | | | | (CACT) | |
| | | | | | deficiency | |
| CPT1A | 1374 | 0110090 | P50416, | 184 | carnitine | Fatty acid oxidation |
| | | | A0A024R5F4, | | palmitoyltransferase | |
| | | | B2RAQ8, | | type I (CPT I) | |
| | | | Q8WZ48 | | deficiency | |
| HADHA | 3030 | 0084754 | E9KL44, | 185 | long chain 3- | Fatty acid oxidation |
| | | | P40939 | | hydroxyacyl-CoA | |
| | | | | | dehydrogenase | |
| | | | | | (LCHAD) | |
| | | | | | deficiency | |
| HADH | 3033 | 0138796 | Q16836, | 186 | medium/short | Fatty acid oxidation |
| | | | B3KTT6 | | chain acyl-CoA | |
| | | | | | dehydrogenase | |
| | | | | | (M/SCHAD) | |
| | | | | | deficiency | |
| SLC52A1 | 55065 | 0132517 | Q9NWF4 | 187 | Riboflavin | Fatty acid oxidation |
| | | | | | transporter | |
| | | | | | deficiency | |
| SLC52A2 | 79581 | 0185803 | Q9HAB3 | 188 | Riboflavin | Fatty acid oxidation |
| | | | | | transporter | |
| | | | | | deficiency | |
| SLC52A3 | 113278 | 0101276 | K0A6P4, | 189 | Riboflavin | Fatty acid oxidation |
| | | | Q9NQ40 | | transporter | |
| | | | | | deficiency | |
| HADHB | 3032 | 0138029 | P55084, | 190 | Trifunctional | Fatty acid oxidation |
| | | | F5GZQ3 | | protein deficiency | |
| GYS2 | 2998 | 0111713 | P54840 | 191 | GSD 0 (Glycogen | Liver glycogen storage |
| | | | | | synthase, liver | disorder |
| | | | | | isoform) | |
| PYGL | 5836 | 0100504 | P06737 | 192 | GSD VI (Hers | Liver glycogen storage |
| | | | | | disease) | disorder |
| SLC2A2 | 6514 | 0163581 | P11168, | 193 | Fanconi-Bickel | Liver glycogen storage |
| | | | Q6PAU8 | | syndrome | disorder |
| ALG1 | 56052 | 0033011 | Q9BT22 | 194 | ALG1-CDG | Glycosylation disorder |
| ALG2 | 85365 | 0119523 | A0A024R184, | 195 | ALG2-associated | Glycosylation disorder |
| | | | Q9H553 | | myasthenic | |
| | | | | | syndrome | |
| ALG3 | 10195 | 0214160 | Q92685, | 196 | ALG3-CDG | Glycosylation disorder |
| | | | C9J7S5 | | | |
| ALG6 | 29929 | 0088035 | Q9Y672 | 197 | ALG6-CDG | Glycosylation disorder |
| ALG8 | 79053 | 0159063 | Q9BVK2, | 198 | ALG8-CDG | Glycosylation disorder |
| | | | A0A024R5K5 | | | |
| ALG9 | 79796 | 0086848 | Q9H6U8 | 199 | ALG9-CDG | Glycosylation disorder |
| ALG11 | 440138 | 0253710 | Q2TAA5 | 200 | ALG11-CDG | Glycosylation disorder |
| ALG12 | 79087 | 0182858 | A0A024R4V6, | 201 | ALG12-CDG | Glycosylation disorder |
| | | | Q9BV10 | | | |
| ALG13 | 79868 | 0101901 | Q9NP73, | 202 | ALG13-CDG | Glycosylation disorder |
| | | | A0A087WX43, | | | |
| | | | A0A087WT15 | | | |
| ATP6V0A2 | 23545 | 0185344 | Q9Y487 | 203 | ATP6V0A2- | Glycosylation disorder |
| | | | | | associated cutis | |
| | | | | | laxa | |
| B3GLCT | 145173 | 0187676 | Q6Y288 | 204 | B3GLCT-CDG | Glycosylation disorder |
| CHST14 | 113189 | 0169105 | Q8NCH0 | 205 | CHST14-CDG | Glycosylation disorder |
| COG1 | 9382 | 0166685 | Q8WTW3 | 206 | COG1-CDG | Glycosylation disorder |
| COG2 | 22796 | 0135775 | Q14746, | 207 | COG2-CDG | Glycosylation disorder |
| | | | B1ALW7 | | | |
| COG4 | 25839 | 0103051 | A0A0A0MS45, | 208 | COG4-CDG | Glycosylation disorder |
| | | | Q8N8L9, | | | |
| | | | Q9H9E3, | | | |
| | | | J3KNI1 | | | |
| COG5 | 10466 | 0164597, | Q9UP83 | 209 | COG5-CDG | Glycosylation disorder |
| | | 0284369 | | | | |
| COG6 | 57511 | 0133103 | A0A140VJG7, | 210 | COG6-CDG | Glycosylation disorder |
| | | | Q9Y2V7, | | | |
| | | | A0A024RDW5 | | | |
| COG7 | 91949 | 0168434 | A0A0S2Z652, | 211 | COG7-CDG | Glycosylation disorder |
| | | | P83436 | | | |
| COG8 | 84342 | 0272617 | A0A024R6Z6, | 212 | COG8-CDG | Glycosylation disorder |
| | | | Q96MW5 | | | |
| DOLK | 22845 | 0175283 | A0A0S2Z597, | 213 | DOLK-CDG | Glycosylation disorder |
| | | | Q9UPQ8 | | | |
| DHDDS | 79947 | 0117682 | Q86SQ9 | 214 | DHDDS-CDG | Glycosylation disorder |
| DPAGT1 | 1798 | 0172269 | A0A024R3H8, | 215 | DPAGT1-CDG | Glycosylation disorder |
| | | | Q9H3H5 | | | |
| DPM1 | 8813 | 0000419 | O60762, | 216 | DPM1-CDG | Glycosylation disorder |
| | | | Q5QPK2, | | | |
| | | | A0A0S2Z4Y5 | | | |
| DPM2 | 8818 | 0136908 | O94777 | 217 | DPM2-CDG | Glycosylation disorder |
| DPM3 | 54344 | 0179085 | A0A140VJI4, | 218 | DPM3-CDG | Glycosylation disorder |
| | | | Q9P2X0, | | | |
| | | | Q86TM7 | | | |
| G6PC3 | 92579 | 0141349 | Q9BUM1 | 219 | Congenital | Glycosylation disorder |
| | | | | | neutropenia | |
| GFPT1 | 2673 | 0198380 | Q06210 | 220 | Congenital | Glycosylation disorder |
| | | | | | myasthenic | |
| | | | | | syndrome | |
| GMPPA | 29926 | 0144591 | A0A024R482, | 221 | GMPPA-CDG | Glycosylation disorder |
| | | | Q96IJ6 | | | |
| GMPPB | 29925 | 0173540 | Q9Y5P6 | 222 | Congenital | Glycosylation disorder |
| | | | | | muscular | |
| | | | | | dystrophy, | |
| | | | | | congenital | |
| | | | | | myasthenic | |
| | | | | | syndrome, and | |
| | | | | | dystroglycanopathy | |
| MAGT1 | 84061 | 0102158 | A0A087WU53, | 223 | MAGT1-CDG; X- | Glycosylation disorder |
| | | | Q9H0U3 | | linked | |
| | | | | | immunodeficiency | |
| | | | | | with magnesium | |
| | | | | | defect, Epstein- | |
| | | | | | Barr virus | |
| | | | | | infection and | |
| | | | | | neoplasia (XMEN) | |
| | | | | | syndrome | |
| MAN1B1 | 11253 | 0177239 | Q9UKM7 | 224 | MAN1B1-CDG | Glycosylation disorder |
| MGAT2 | 4247 | 0168282 | Q10469 | 225 | MGAT2-CDG | Glycosylation disorder |
| MOGS | 7841 | 0115275 | Q13724, | 226 | MOGS-CDG | Glycosylation disorder |
| | | | Q58F09 | | | |
| MPDU1 | 9526 | 0129255 | J3QW43, | 227 | MPDU1-CDG | Glycosylation disorder |
| | | | O75352, | | | |
| | | | A0A0S2Z4W8, | | | |
| | | | B4DLH7 | | | |
| MPI | 4351 | 0178802 | H3BPP3, | 228 | MPI-CDG | Glycosylation disorder |
| | | | Q8NHZ6, | | | |
| | | | B4DW50, | | | |
| | | | F5GX71, | | | |
| | | | P34949, | | | |
| | | | H3BPB8 | | | |
| NGLY1 | 55768 | 0151092 | Q96IV0 | 229 | NGLY1-CDG | Glycosylation disorder |
| PGM1 | 5236 | 0079739 | B7Z6C2, | 230 | PGM1-CDG | Glycosylation disorder |
| | | | P36871, | | | |
| | | | B4DDQ8 | | | |
| PGM3 | 5238 | 0013375 | O95394, | 231 | PGM3-CDG | Glycosylation disorder |
| | | | A0A087WT27 | | | |
| RFT1 | 91869 | 0163933 | Q96AA3 | 232 | RFT1-CDG | Glycosylation disorder |
| SEC23B | 10483 | 0101310 | Q15437, | 233 | SEC23B-CDG | Glycosylation disorder |
| | | | B4DJW8 | | | |
| SLC35A1 | 10559 | 0164414 | P78382 | 234 | SLC35A1-CDG | Glycosylation disorder |
| SLC35A2 | 7355 | 0102100 | P78381, | 235 | SLC35A2-CDG | Glycosylation disorder |
| | | | A6NFI1, | | | |
| | | | A6NKM8, | | | |
| | | | B4DE15 | | | |
| SLC35C1 | 55343 | 0181830 | Q96A29, | 236 | SLC35C1-CDG | Glycosylation disorder |
| | | | B3KQH0 | | | |
| SSR4 | 6748 | 0180879 | P51571 | 237 | SSR4-CDG | Glycosylation disorder |
| SRD5A3 | 79644 | 0128039 | Q9H8P0 | 238 | SRD5A3-CDG | Glycosylation disorder |
| TMEM165 | 55858 | 0134851 | Q9HC07 | 239 | TMEM165-CDG | Glycosylation disorder |
| TRIP11 | 9321 | 0100815 | Q15643 | 240 | TRIP11-CDG | Glycosylation disorder |
| TUSC3 | 7991 | 0104723 | Q13454 | 241 | TUSC3-CDG | Glycosylation disorder |
| ALG14 | 199857 | 0172339 | Q96F25 | 242 | ALG14-CDG | Glycosylation disorder |
| B4GALT1 | 2683 | 0086062 | P15291, | 243 | B4GALT1-CDG | Glycosylation disorder |
| | | | W6MEN3 | | | |
| DDOST | 1650 | 0244038 | A0A024RAD5, | 244 | DDOST-CDG | Glycosylation disorder |
| | | | P39656 | | | |
| NUS1 | 116150 | 0153989 | Q96E22 | 245 | NUS1-CDG | Glycosylation disorder |
| RPN2 | 6185 | 0118705 | P04844 | 246 | RPN2-CDG | Glycosylation disorder |
| SEC23A | 10484 | 0100934 | Q15436 | 247 | SEC23A-CDG | Glycosylation disorder |
| SLC35A3 | 23443 | 0117620 | Q9Y2D2, | 248 | SLC35A3-CDG | Glycosylation disorder |
| | | | A0A1W2PRT7, | | | |
| | | | A0A1W2PSD1, | | | |
| | | | A0A1W2PQL8 | | | |
| ST3GAL3 | 6487 | 0126091 | Q11203 | 249 | ST3GAL3-CDG | Glycosylation disorder |
| STT3A | 3703 | 0134910 | P46977 | 250 | STT3A-CDG | Glycosylation disorder |
| STT3B | 201595 | 0163527 | Q8TCJ2 | 251 | STT3B-CDG | Glycosylation disorder |
| AGA | 175 | 0038002 | P20933 | 252 | Aspartylglucosaminuria | Lyososomal storage |
| | | | | | | disorder |
| ARSA | 410 | 0100299 | A0A0C4DFZ2, | 253 | Metachromatic | Lyososomal storage |
| | | | B4DVI5, | | leukodystrophy | disorder |
| | | | P15289 | | | |
| ARSB | 411 | 0113273 | A0A024RAJ9, | 254 | Mucopolysaccharidosis | Lyososomal storage |
| | | | P15848, | | type VI | disorder |
| | | | A8K4A0 | | | |
| ASAH1 | 427 | 0104763 | A8K0B6, | 255 | Farber disease | Lyososomal storage |
| | | | Q13510, | | | disorder |
| | | | Q53H01 | | | |
| ATP13A2 | 23400 | 0159363 | Q8N4D4, | 256 | Neuronal ceroid | Lyososomal storage |
| | | | Q9NQ11, | | lipofuscinosis 12 | disorder |
| | | | Q8NBS1 | | (CLN12), Kufor- | |
| | | | | | Rakeb syndrome | |
| | | | | | (KRS) | |
| CLN3 | 1201 | 0188603, | A0A024QZB8, | 257 | Neuronal ceroid | Lyososomal storage |
| | | 0261832 | Q13286, | | lipofuscinosis 3 | disorder |
| | | | B4DMY6, | | (CLN3) | |
| | | | Q2TA70, | | | |
| | | | B4DFF3 | | | |
| CLN5 | 1203 | 0102805 | A0A024R644, | 258 | Neuronal ceroid | Lyososomal storage |
| | | | O75503 | | lipofuscinosis 5 | disorder |
| | | | | | (CLN5) | |
| CLN6 | 54982 | 0128973 | A0A024R601, | 259 | Neuronal ceroid | Lyososomal storage |
| | | | Q9NWW5 | | lipofuscinosis 6 | disorder |
| | | | | | (CLN6) | |
| CLN8 | 2055 | 0182372, | A0A024QZ57, | 260 | Neuronal ceroid | Lyososomal storage |
| | | 0278220 | Q9UBY8 | | lipofuscinosis 8 | disorder |
| | | | | | (CLN8) | |
| CTNS | 1497 | 0040531 | A0A0S2Z3I9, | 261 | cystinosis | Lyososomal storage |
| | | | O60931, | | | disorder |
| | | | A0A0S2Z3K3 | | | |
| CTSA | 5476 | 0064601 | P10619, | 262 | Galactosialidosis | Lyososomal storage |
| | | | X6R8A1, | | | disorder |
| | | | B4E324, | | | |
| | | | X6R5C5 | | | |
| CTSD | 1509 | 0117984 | P07339, | 263 | Neuronal ceroid | Lyososomal storage |
| | | | V9HWI3 | | lipofuscinosis 10 | disorder |
| | | | | | (CLN10) | |
| CTSF | 8722 | 0174080 | Q9UBX1 | 264 | Neuronal ceroid | Lyososomal storage |
| | | | | | lipofuscinosis 13 | disorder |
| | | | | | (CLN13) | |
| CTSK | 1513 | 0143387 | P43235 | 265 | Pycnodysostosis | Lyososomal storage |
| | | | | | | disorder |
| DNAJC5 | 80331 | 0101152 | Q6AHX3, | 266 | Neuronal ceroid | Lyososomal storage |
| | | | Q9H3Z4 | | lipofuscinosis 4 | disorder |
| | | | | | (CLN4) | |
| FUCA1 | 2517 | 0179163 | P04066, | 267 | Fucosidosis | Lyososomal storage |
| | | | B5MDC5 | | | disorder |
| GAA | 2548 | 0171298 | P10253 | 268 | Pompe disease | Lyososomal storage |
| | | | | | | disorder |
| GALC | 2581 | 0054983 | A0A0A0MQV0, | 269 | Krabbe disease | Lyososomal storage |
| | | | P54803 | | | disorder |
| GALNS | 2588 | 0141012 | P34059, | 270 | Mucopolysaccharidosis | Lyososomal storage |
| | | | Q96I49, | | type IVa | disorder |
| | | | Q6YL38 | | | |
| GLA | 2717 | 0102393 | P06280, | 271 | Fabry disease | Lyososomal storage |
| | | | Q53Y83 | | | disorder |
| GLB1 | 2720 | 0170266 | P16278, | 272 | GM1 | Lyososomal storage |
| | | | B7Z6Q5 | | gangliosidosis, | disorder |
| | | | | | Mucopolysaccharidosis | |
| | | | | | IVb | |
| GM2A | 2760 | 0196743 | P17900 | 273 | GM2- | Lyososomal storage |
| | | | | | gangliosidosis, AB | disorder |
| | | | | | variant | |
| GNPTAB | 79158 | 0111670 | Q3T906 | 274 | Mucolipidosis type | Lyososomal storage |
| | | | | | II alpha/beta, | disorder |
| | | | | | Mucolipidosis III | |
| | | | | | alpha/beta | |
| GNPTG | 84572 | 0090581 | Q9UJJ9 | 275 | Mucolipidosis III | Lyososomal storage |
| | | | | | gamma | disorder |
| GNS | 2799 | 0135677 | A0A024RBC5, | 276 | Mucopolysaccharidosis | Lyososomal storage |
| | | | P15586, | | type IIID | disorder |
| | | | Q7Z3X3 | | | |
| GRN | 2896 | 0030582 | P28799 | 277 | Neuronal ceroid | Lyososomal storage |
| | | | | | lipofuscinosis 11 | disorder |
| | | | | | (CLN11), | |
| | | | | | frontotemporal | |
| | | | | | dementia | |
| GUSB | 2990 | 0169919 | P08236 | 278 | Mucopolysaccharidosis | Lyososomal storage |
| | | | | | type VII | disorder |
| HEXA | 3073 | 0213614 | A0A0S2Z3W3, | 279 | Tay-Sachs disease | Lyososomal storage |
| | | | P06865, | | | disorder |
| | | | B4DVA7, | | | |
| | | | H3BP20 | | | |
| HEXB | 3074 | 0049860 | A0A024RAJ6, | 280 | Sandhoff diseaase | Lyososomal storage |
| | | | P07686, | | | disorder |
| | | | Q5URX0 | | | |
| HGSNAT | 138050 | 0165102 | Q68CP4, | 281 | Mucopolysaccharidosis | Lyososomal storage |
| | | | Q8IVU6 | | type IIIC | disorder |
| HYAL1 | 3373 | 0114378 | A0A024R2X3, | 282 | Mucopolysaccharidosis | Lyososomal storage |
| | | | QI2794, | | type IX | disorder |
| | | | B3KUI5, | | | |
| | | | A0A0S2Z3Q0 | | | |
| IDS | 3423 | 0010404 | P22304, | 283 | Mucopolysaccharidosis | Lyososomal storage |
| | | | B4DGD7 | | type II | disorder |
| IDUA | 3425 | 0127415 | P35475 | 284 | Mucopolysaccharidosis | Lyososomal storage |
| | | | | | type I | disorder |
| KCTD7 | 154881 | 0243335 | Q96MP8, | 285 | Neuronal ceroid | Lyososomal storage |
| | | | A0A024RDN7 | | lipofuscinosis 14 | disorder |
| | | | | | (CLN14) | |
| LAMP2 | 3920 | 0005893 | P13473 | 286 | Danon disease | Lyososomal storage |
| | | | | | | disorder |
| MAN2B1 | 4125 | 0104774 | O00754, | 287 | alpha- | Lyososomal storage |
| | | | A8K6A7 | | mannosidosis | disorder |
| MANBA | 4126 | 0109323 | O00462 | 288 | beta-mannosidosis | Lyososomal storage |
| | | | | | | disorder |
| MCOLN1 | 57192 | 0090674 | Q9GZU1 | 289 | Mucolipidosis type | Lyososomal storage |
| | | | | | IV | disorder |
| MFSD8 | 256471 | 0164073 | Q8NHS3 | 290 | Neuronal ceroid | Lyososomal storage |
| | | | | | lipofuscinosis 7 | disorder |
| | | | | | (CLN7) | |
| NAGA | 4668 | 0198951 | A0A024R1Q5, | 291 | Schindler disease | Lyososomal storage |
| | | | P17050 | | | disorder |
| NAGLU | 4669 | 0108784 | A0A140VJE4, | 292 | Mucopolysaccharidosis | Lyososomal storage |
| | | | P54802 | | IIIB | disorder |
| NEU1 | 4758 | 0204386, | Q5JQI0, | 293 | Mucolipidosis type | Lyososomal storage |
| | | 0227315, | Q99519 | | I, Sialidosis I | disorder |
| | | 0227129, | | | | |
| | | 0223957, | | | | |
| | | 0234846, | | | | |
| | | 0184494, | | | | |
| | | 0228691, | | | | |
| | | 0234343 | | | | |
| NPC1 | 4864 | 0141458 | O15118 | 294 | Niemann-Pick | Lyososomal storage |
| | | | | | type C | disorder |
| NPC2 | 10577 | 0119655 | A0A024R6C0, | 295 | Niemann-Pick | Lyososomal storage |
| | | | P61916, | | type C | disorder |
| | | | G3V3E8 | | | |
| SGSH | 6448 | 0181523 | P51688 | 296 | Mucopolysaccharidosis | Lyososomal storage |
| | | | | | IIIA | disorder |
| PPT1 | 5538 | 0131238 | P50897 | 297 | Neuronal ceroid | Lyososomal storage |
| | | | | | lipofuscinosis 1 | disorder |
| | | | | | (CLN1) | |
| PSAP | 5660 | 0197746 | P07602, | 298 | Prosaposin | Lyososomal storage |
| | | | A0A024QZQ2 | | deficiency, SapA | disorder |
| | | | | | deficiency (Krabbe | |
| | | | | | variant), SapB | |
| | | | | | deficiency | |
| | | | | | (MLD variant), | |
| | | | | | SapC deficiency | |
| | | | | | (Gaucher variant) | |
| SLC17A5 | 26503 | 0119899 | Q9NRA2 | 299 | Infantile sialic acid | Lyososomal storage |
| | | | | | storage disease, | disorder |
| | | | | | Salla disease | |
| SMPD1 | 6609 | 0166311 | P17405, | 300 | Niemann Pick | Lyososomal storage |
| | | | Q59EN6, | | types A and B | disorder |
| | | | E9LUE8, | | | |
| | | | Q8IUN0, | | | |
| | | | E9LUE9 | | | |
| SUMF1 | 285362 | 0144455 | Q8NBK3 | 301 | Multiple sulfatase | Lyososomal storage |
| | | | | | deficiency | disorder |
| TPP1 | 1200 | 0166340 | O14773 | 302 | Neuronal ceroid | Lyososomal storage |
| | | | | | lipofuscinosis 2 | disorder |
| | | | | | (CLN2) | |
| AHCY | 191 | 0101444 | P23526, | 303 | Hypermethioninemia | Aminoacidophaty |
| | | | Q1RMG2 | | | |
| GNMT | 27232 | 0124713 | A0A0S2Z5F2, | 304 | Hypermethioninemia | Aminoacidophaty |
| | | | Q14749, | | | |
| | | | V9HW60 | | | |
| MAT1A | 4143 | 0151224 | Q00266 | 305 | Hypermethioninemia | Aminoacidophaty |
| GCH1 | 2643 | 0131979 | A0A024R642, | 306 | BH4 cofactor | Aminoacidophaty |
| | | | P30793, | | deficiency | |
| | | | Q8IZH9 | | | |
| PCBD1 | 5092 | 0166228 | P61457 | 307 | BH4 cofactor | Aminoacidophaty |
| | | | | | deficiency | |
| PTS | 5805 | 0150787 | Q03393 | 308 | BH4 cofactor | Aminoacidophaty |
| | | | | | deficiency | |
| QDPR | 5860 | 0151552 | A0A140VKA9, | 309 | BH4 cofactor | Aminoacidophaty |
| | | | P09417 | | deficiency | |
| SPR | 6697 | 0116096 | P35270 | 310 | BH4 cofactor | Aminoacidophaty |
| | | | | | deficiency | |
| DNAJC12 | 56521 | 0108176 | Q6IAH1, | 311 | Phenylalanine, | Aminoacidophaty |
| | | | Q9UKB3 | | tyrosine, and | |
| | | | | | tryptophan | |
| | | | | | hydroxylases heat | |
| | | | | | shock | |
| | | | | | co-chaperone | |
| | | | | | deficiency | |
| ALDH4A1 | 8659 | 0159423 | P30038, | 312 | Hyperprolinemia | Aminoacidophaty |
| | | | A0A024RAD8 | | | |
| PRODH | 5625 | 0100033 | O43272 | 313 | Hyperprolinemia | Aminoacidophaty |
| HPD | 3242 | 0158104 | P32754 | 314 | Tyrosinemia type | Aminoacidophaty |
| | | | | | II | |
| GBA | 2629 | 0177628, | A0A068F658, | 315 | Gaucher disease | |
| | | 0262446 | P04062, | | | |
| | | | B7Z6S9 | | | |
| HGD | 3081 | 0113924 | Q93099, | 316 | Alkaptonuria | |
| | | | B3KW64 | | | |
| AMN | 81693 | 0166126 | Q9BXJ7, | 317 | Combined | Organic acidemia |
| | | | B3KP64 | | Methylmalonic | |
| | | | | | Acidemia and | |
| | | | | | Homocystinuria | |
| CD320 | 51293 | 0167775 | Q9NPF0 | 318 | Combined | Organic acidemia |
| | | | | | Methylmalonic | |
| | | | | | Acidemia and | |
| | | | | | Homocystinuria | |
| CUBN | 8029 | 0107611 | O60494 | 319 | Combined | Organic acidemia |
| | | | | | Methylmalonic | |
| | | | | | Acidemia and | |
| | | | | | Homocystinuria | |
| GIF | 2694 | 0134812 | P27352 | 320 | Combined | Organic acidemia |
| | | | | | Methylmalonic | |
| | | | | | Acidemia and | |
| | | | | | Homocystinuria | |
| TCN1 | 6947 | 0134827 | P20061 | 321 | Combined | Organic acidemia |
| | | | | | Methylmalonic | |
| | | | | | Acidemia and | |
| | | | | | Homocystinuria | |
| TCN2 | 6948 | 0185339 | P20062 | 322 | Combined | Organic acidemia |
| | | | | | Methylmalonic | |
| | | | | | Acidemia and | |
| | | | | | Homocystinuria | |
| PREPL | 9581 | 0138078 | Q4J6C6 | 323 | Cystinuria | Aminoacidophaty |
| PHGDH | 26227 | 0092621 | O43175 | 324 | Disorders of | Aminoacidophaty |
| | | | | | Serine | |
| | | | | | Biosynthesis | |
| PSAT1 | 29968 | 0135069 | A0A024R280, | 325 | Disorders of | Aminoacidophaty |
| | | | Q9Y617, | | Serine | |
| | | | A0A024R222 | | Biosynthesis | |
| PSPH | 5723 | 0146733 | A0A024RDL3, | 326 | Disorders of | Aminoacidophaty |
| | | | P78330 | | Serine | |
| | | | | | Biosynthesis | |
| AMT | 275 | 0145020 | A0A024R2U7, | 327 | Glycine | Aminoacidophaty |
| | | | P48728 | | Encephalopathy | |
| GCSH | 2653 | 0140905 | P23434 | 328 | Glycine | Aminoacidophaty |
| | | | | | Encephalopathy | |
| GLDC | 2731 | 0178445 | P23378 | 329 | Glycine | Aminoacidophaty |
| | | | | | Encephalopathy | |
| LIAS | 11019 | 0121897 | O43766, | 330 | Glycine | Aminoacidophaty |
| | | | Q6P5Q6, | | Encephalopathy | |
| | | | B4E0L7, | | | |
| | | | A0A024R9W0, | | | |
| | | | A0A1W2PQE9, | | | |
| | | | A0A1X7SBR7 | | | |
| NFU1 | 27247 | 0169599 | Q9UMS0 | 331 | Glycine | Aminoacidophaty |
| | | | | | Encephalopathy | |
| SLC6A9 | 6536 | 0196517 | P48067, | 332 | Glycine | Aminoacidophaty |
| | | | B7Z3W8, | | Encephalopathy | |
| | | | B7Z589 | | | |
| SLC2A1 | 6513 | 0117394 | P11166, | 333 | Glucose | Carbohydrate disorder |
| | | | Q59GX2 | | Transporter Type 1 | |
| | | | | | Deficiency | |
| ATP7A | 538 | 0165240 | B4DRW0, | 334 | ATP7A-Related | Metal transport disorder |
| | | | Q04656, | | Disorders | |
| | | | Q762B6 | | Copper | |
| | | | | | Metabolism | |
| | | | | | Disorder | |
| AP1S1 | 1174 | 0106367 | A0A024QYT6, | 335 | Copper | Metal transport disorder |
| | | | P61966 | | Metabolism | |
| | | | | | Disorder | |
| CP | 1356 | 0047457 | A5PL27, | 336 | Copper | Metal transport disorder |
| | | | P00450 | | Metabolism | |
| | | | | | Disorder | |
| SLC33A1 | 9197 | 0169359 | O00400 | 337 | Copper | Metal transport disorder |
| | | | | | Metabolism | |
| | | | | | Disorder | |
| PEX7 | 5191 | 0112357 | O00628, | 338 | Adult Refsum | Peroxisomal disorders |
| | | | Q6FGN1 | | Disease | |
| | | | | | Rhizomelic | |
| | | | | | Chondrodysplasia | |
| | | | | | Punctata Spectrum | |
| PHYH | 5264 | 0107537 | O14832 | 339 | Adult Refsum | Peroxisomal disorders |
| | | | | | Disease | |
| AGPS | 8540 | 0018510 | O00116, | 340 | Rhizomelic | Peroxisomal disorders |
| | | | B7Z3Q4 | | Chondrodysplasia | |
| | | | | | Punctata Spectrum | |
| GNPAT | 8443 | 0116906 | O15228 | 341 | Rhizomelic | Peroxisomal disorders |
| | | | | | Chondrodysplasia | |
| | | | | | Punctata Spectrum | |
| ABCD1 | 215 | 0101986 | P33897 | 342 | X-linked | Peroxisomal disorders |
| | | | | | Adrenoleukodystrophy | |
| ACOX1 | 51 | 0161533 | Q15067 | 343 | X-linked | Peroxisomal disorders |
| | | | | | Adrenoleukodystrophy | |
| PEX1 | 5189 | 0127980 | O43933, | 344 | X-linked | Peroxisomal disorders |
| | | | A0A0C4DG33, | | Adrenoleukodystrophy | |
| | | | B4DER6 | | | |
| PEX2 | 5828 | 0164751 | P28328 | 345 | X-linked | Peroxisomal disorders |
| | | | | | Adrenoleukodystrophy | |
| PEX3 | 8504 | 0034693 | P56589 | 346 | X-linked | Peroxisomal disorders |
| | | | | | Adrenoleukodystrophy | |
| PEX5 | 5830 | 0139197 | A0A0S2Z480, | 347 | X-linked | Peroxisomal disorders |
| | | | P50542, | | Adrenoleukodystrophy | |
| | | | B4DR50, | | | |
| | | | A0A0S2Z4F3, | | | |
| | | | A0A0S2Z4H1, | | | |
| | | | B4E0T2 | | | |
| PEX6 | 5190 | 0124587 | A0A024RD09, | 348 | X-linked | Peroxisomal disorders |
| | | | Q13608 | | Adrenoleukodystrophy | |
| PEX10 | 5192 | 0157911 | A0A024R068, | 349 | X-linked | Peroxisomal disorders |
| | | | O60683, | | Adrenoleukodystrophy | |
| | | | A0A024R0A4 | | | |
| PEX12 | 5193 | 0108733 | O00623 | 350 | X-linked | Peroxisomal disorders |
| | | | | | Adrenoleukodystrophy | |
| PEX13 | 5194 | 0162928 | Q92968 | 351 | X-linked | Peroxisomal disorders |
| | | | | | Adrenoleukodystrophy | |
| PEX14 | 5195 | 0142655 | O75381 | 352 | X-linked | Peroxisomal disorders |
| | | | | | Adrenoleukodystrophy | |
| PEX16 | 9409 | 0121680 | Q9Y5Y5 | 353 | X-linked | Peroxisomal disorders |
| | | | | | Adrenoleukodystrophy | |
| PEX19 | 5824 | 0162735 | P40855, | 354 | X-linked | Peroxisomal disorders |
| | | | A0A0S2Z497 | | Adrenoleukodystrophy | |
| PEX26 | 55670 | 0215193 | A0A024R100, | 355 | X-linked | Peroxisomal disorders |
| | | | Q7Z412, | | Adrenoleukodystrophy | |
| | | | A0A0S2Z5M7, | | | |
| | | | Q7Z2D7 | | | |
| AMACR | 23600 | 0242110 | Q9UHK6 | 356 | Zellweger | Peroxisomal disorders |
| | | | | | Spectrum Disorder | |
| ADA | 100 | 0196839 | A0A0S2Z381, | 357 | Purine Metabolism | Purine Metabolism |
| | | | P00813, | | Disorder | Disorder |
| | | | F5GWI4 | | | |
| ADSL | 158 | 0239900 | P30566, | 358 | Purine Metabolism | Purine Metabolism |
| | | | X5D8S6, | | Disorder | Disorder |
| | | | X5D7W4, | | | |
| | | | A0A1B0GWJ0 | | | |
| AMPD1 | 270 | 0116748 | P23109 | 359 | Purine Metabolism | Purine Metabolism |
| | | | | | Disorder | Disorder |
| GPHN | 10243 | 0171723 | Q9NQX3 | 360 | Purine Metabolism | Purine Metabolism |
| | | | | | Disorder | Disorder |
| MOCOS | 55034 | 0075643 | Q96EN8 | 361 | Purine Metabolism | Purine Metabolism |
| | | | | | Disorder | Disorder |
| MOCS1 | 4337 | 0124615 | A0A024RD17, | 362 | Purine Metabolism | Purine Metabolism |
| | | | Q9NZB8 | | Disorder | Disorder |
| PNP | 4860 | 0198805 | P00491, | 363 | Purine Metabolism | Purine Metabolism |
| | | | V9HWH6 | | Disorder | Disorder |
| XDH | 7498 | 0158125 | P47989 | 364 | Purine Metabolism | Purine Metabolism |
| | | | | | Disorder | Disorder |
| SUOX | 6821 | 0139531 | A0A024RB79, | 365 | Purine Metabolism | Purine Metabolism |
| | | | P51687 | | Disorder | Disorder |
| OGDH | 4967 | 0105953 | A0A140VJQ5, | 366 | 2-Ketoglutarate | PYRUVATE |
| | | | Q02218, | | Dehydrogenase | METABOLISM AND |
| | | | B4E3E9, | | Deficiency | TRICARBOXYLIC ACID |
| | | | E9PCR7, | | | CYCLE DEFECT |
| | | | E9PDF2 | | | |
| SLC25A19 | 60386 | 0125454 | Q5JPC1, | 367 | 2-Ketoglutarate | PYRUVATE |
| | | | Q9HC21 | | Dehydrogenase | METABOLISM AND |
| | | | | | Deficiency | TRICARBOXYLIC ACID |
| | | | | | | CYCLE DEFECT |
| DHTKD1 | 55526 | 0181192 | Q96HY7 | 368 | 2-Ketoglutarate | PYRUVATE |
| | | | | | Dehydrogenase | METABOLISM AND |
| | | | | | Deficiency | TRICARBOXYLIC ACID |
| | | | | | | CYCLE DEFECT |
| SLC13A5 | 284111 | 0141485 | Q68D44, | 369 | Citrate Transporter | PYRUVATE |
| | | | Q86YT5 | | Deficiency | METABOLISM AND |
| | | | | | | TRICARBOXYLIC ACID |
| | | | | | | CYCLE DEFECT |
| FH | 2271 | 0091483 | A0A0S2Z4C3, | 370 | Fumarase | PYRUVATE |
| | | | P07954 | | Deficiency | METABOLISM AND |
| | | | | | | TRICARBOXYLIC ACID |
| | | | | | | CYCLE DEFECT |
| DLAT | 1737 | 0150768 | P10515, | 371 | Pyruvate | PYRUVATE |
| | | | Q86YI5 | | Dehydrogenase | METABOLISM AND |
| | | | | | Deficiency | TRICARBOXYLIC ACID |
| | | | | | | CYCLE DEFECT |
| MPC1 | 51660 | 0060762 | Q5TI65, | 372 | Pyruvate | PYRUVATE |
| | | | Q9Y5U8 | | Dehydrogenase | METABOLISM AND |
| | | | | | Deficiency | TRICARBOXYLIC ACID |
| | | | | | | CYCLE DEFECT |
| PDHA1 | 5160 | 0131828 | A0A024RBX9, | 373 | Pyruvate | PYRUVATE |
| | | | P08559 | | Dehydrogenase | METABOLISM AND |
| | | | | | Deficiency | TRICARBOXYLIC ACID |
| | | | | | | CYCLE DEFECT |
| PDHB | 5162 | 0168291 | P11177 | 374 | Pyruvate | PYRUVATE |
| | | | | | Dehydrogenase | METABOLISM AND |
| | | | | | Deficiency | TRICARBOXYLIC ACID |
| | | | | | | CYCLE DEFECT |
| PDHX | 8050 | 0110435 | O00330 | 375 | Pyruvate | PYRUVATE |
| | | | | | Dehydrogenase | METABOLISM AND |
| | | | | | Deficiency | TRICARBOXYLIC ACID |
| | | | | | | CYCLE DEFECT |
| PDP1 | 54704 | 0164951 | Q9P0J1, | 376 | Pyruvate | PYRUVATE |
| | | | Q6P1N1, | | Dehydrogenase | METABOLISM AND |
| | | | A0A024R9C0 | | Deficiency | TRICARBOXYLIC ACID |
| | | | | | | CYCLE DEFECT |
| ABCC2 | 1244 | 0023839 | Q92887 | 377 | Dubin-Johnson | |
| | | | | | syndrome | |
| SLCO1B1 | 10599 | 0134538 | A0A024RAU7, | 378 | Rotor Syndrome | |
| | | | Q05CV5, | | | |
| | | | Q9Y6L6 | | | |
| SLCO1B3 | 28234 | 0111700 | B3KP78, | 379 | Rotor Syndrome | |
| | | | Q9NPD5 | | | |
| HFE2 | 148738 | 0168509 | Q6ZVN8, | 380 | Hemochromatosis, | |
| | | | A8K466, | | type 2A | |
| | | | A0A024R4F5 | | | |
| ADAMTS13 | 11093 | 0160323, | Q76LX8 | 381 | Congenital | |
| | | 0281244 | | | thrombotic | |
| | | | | | thrombocytopenic | |
| | | | | | purpura due to | |
| | | | | | ADAMTS-13 | |
| | | | | | deficiency | |
| PYGM | 5837 | 0068976 | P11217 | 382 | McArdle's Disease | |
| COL1A2 | 1278 | 0164692 | A0A0S2Z3H5, | 383 | Ehlers-Danlos | |
| | | | P08123 | | syndrome, cardiac | |
| | | | | | valvular type | |
| TNFRSF11B | 4982 | 0164761 | O00300 | 384 | Juvenile Paget's | |
| | | | | | disease | |
| TSC1 | 7248 | 0165699 | Q86WV8, | 385 | Tuberous sclerosis | |
| | | | Q92574, | | | |
| | | | X5D9D2, | | | |
| | | | Q32NF0 | | | |
| TSC2 | 7249 | 0103197 | P49815, | 386 | Tuberous sclerosis | |
| | | | X5D7Q2, | | | |
| | | | B3KWH7, | | | |
| | | | Q5HYF7, | | | |
| | | | H3BMQ0, | | | |
| | | | X5D2U8 | | | |
| DHCR7 | 1717 | 0172893 | A0A024R5F7, | 387 | Smith-Lemli-Opitz | |
| | | | Q9UBM7 | | Syndrome | |
| PGK1 | 5230 | 0102144 | P00558, | 388 | D- | |
| | | | V9HWF4 | | glycericacidemia | |
| VLDLR | 7436 | 0147852 | P98155, | 389 | Dysequilibrium | |
| | | | Q5VVF5 | | syndrome | |
| KYNU | 8942 | 0115919 | Q16719 | 390 | Encephalopathy | |
| | | | | | due to | |
| | | | | | hydroxykynureninuria | |
| F5 | 2153 | 0198734 | P12259 | 391 | Factor V | |
| | | | | | deficiency | |
| C3 | 718 | 0125730 | B4DR57, | 392 | Atypical hemolytic | |
| | | | P01024, | | uremic syndrome | |
| | | | V9HWA9 | | with C3 anomaly | |
| COL4A1 | 1282 | 0187498 | A5PKV2, | 393 | Autosomal | |
| | | | F5H5K0, | | dominant familial | |
| | | | P02462 | | hematuria - retinal | |
| | | | | | arteriolar | |
| | | | | | tortuosity - | |
| | | | | | contractures | |
| CFH | 3075 | 0000971 | A0A024R962, | 394 | Atypical hemolytic | |
| | | | P08603, | | uremic syndrome | |
| | | | A0A0D9SG88 | | | |
| SLC12A2 | 6558 | 0064651 | P55011, | 395 | Bartter syndrome | |
| | | | Q53ZR1, | | type I (neonatal) | |
| | | | B7ZM24 | | | |
| GK | 2710 | 0198814 | B4DH54, | 396 | Glycerol kinase | |
| | | | P32189 | | deficiency | |
| SFTPC | 6440 | 0168484 | A0A0A0MTC9, | 397 | Chronic | |
| | | | P11686, | | respiratory distress | |
| | | | A0A0S2Z4Q0, | | with surfactant | |
| | | | E5RI64 | | metabolism | |
| | | | | | deficiency | |
| CRTAP | 10491 | 0170275 | O75718 | 398 | Osteogenesis | |
| | | | | | Imperfecta VII | |
| P3H1 | 64175 | 0117385 | Q32P28 | 399 | Osteogenesis | |
| | | | | | Imperfecta VIII | |
| COL7A1 | 1294 | 0114270 | Q02388, | 400 | Autosomal | |
| | | | Q59F16 | | recessive | |
| | | | | | dystrophic | |
| | | | | | epidermolysis | |
| | | | | | bullosa | |
| PKLR | 5313 | 0143627 | P30613 | 401 | Pyruvate Kinase | |
| | | | | | deficiency | |
| TALDO1 | 6888 | 0177156 | A0A140VK56, | 402 | Transaldolase | |
| | | | P37837 | | deficiency | |
| TF | 7018 | 0091513 | A0PJA6, | 403 | Atransferrinemia | |
| | | | P02787, | | (familial | |
| | | | Q06AH7 | | hypotransferrinemia) | |
| EPCAM | 4072 | 0119888 | P16422 | 404 | Intestinal epithelial | |
| | | | | | dysplasia | |
| VHL | 7428 | 0134086 | A0A024R2F2, | 405 | Familial | |
| | | | P40337, | | erythrocytosis type | |
| | | | A0A0S2Z4K1 | | 2; von Hippel | |
| | | | | | Lindau disease | |
| GC | 2638 | 0145321 | P02774 | 406 | Vitamin D | |
| | | | | | deficiency | |
| SERPINA1 | 5265 | 0197249, | E9KL23, | 407 | Alpha-1 | |
| | | 0277377 | P01009 | | antitrypsin | |
| | | | | | deficiency | |
| ABCC6 | 368 | 0091262, | O95255 | 408 | Pseudoxanthoma | |
| | | 0275331 | | | elasticum | |
| F8 | 2157 | 0185010 | P00451 | 409 | Hemophilia A | |
| F9 | 2158 | 0101981 | P00740 | 410 | Hemophilia B | |
| ApoB | 338 | 0084674 | P04114 | 411 | Familial | |
| | | | | | hypercholesterolemia | |
| PCSK9 | 255738 | 0169174 | Q8NBP7 | 412 | Familial | |
| | | | | | hypercholesterolemia | |
| LDLRAP1 | 26119 | 0157978 | B3KR97, | 413 | Familial | |
| | | | Q5SW96 | | hypercholesterolemia | |
| ABCG5 | 64240 | 0138075 | Q9H222 | 414 | Sitosterolemia | |
| ABCG8 | 64241 | 0143921 | Q9H221 | 415 | Sitosterolemia | |
| LCAT | 3931 | 0213398 | A0A140VK24, | 416 | Lecithin | |
| | | | P04180 | | cholesterol | |
| | | | | | acyltransferase | |
| | | | | | deficiency | |
| SPINK5 | 11005 | 0133710 | Q9NQ38 | 417 | Netherton | |
| | | | | | syndrome | |
| GNE | 10020 | 0159921 | Q9Y223 | 418 | Inclusion body | |
| | | | | | myopathy 2 | |

[0327] In some embodiments, the targeted lipid particle or lentiviral vector contains an exogenous agent that is capable of targeting a T cell. In some embodiments, the exogenous agent capable of targeting a T cell is a chimeric antigen receptor (CAR), a T cell receptor, an integrin, an ion channel, a pore forming protein, a Toll-Like Receptor, an interleukin receptor, a cell adhesion protein, or a transport protein.

[0328] In some embodiments, the CAR is or comprises a first generation CAR comprising an antigen binding domain, a transmembrane domain, and signaling domain (e.g., one, two or three signaling domains). In some embodiments, the CAR comprises a third generation CAR comprising an antigen binding domain, a transmembrane domain, and at least three signaling domains. In some embodiments, a fourth generation CAR comprising an antigen binding domain, a transmembrane domain, three or four signaling domains, and a domain which upon successful signaling of the CAR induces expression of a cytokine gene. In some embodiments, the antigen binding domain is or comprises an scFv or Fab.

[0329] In some embodiments, a CAR antigen binding domain is or comprises an antibody or antigen-binding portion thereof. In some embodiments, a CAR antigen binding domain is or comprises an scFv or Fab. In some embodiments a CAR antigen binding domain comprises an scFv or Fab fragment of a T-cell alpha chain antibody; T-cell β chain antibody; T-cell γ chain antibody; T-cell δ chain antibody; CCR7 antibody; CD3 antibody; CD4 antibody; CD5 antibody; CD7 antibody; CD8 antibody; CD11b antibody; CD11c antibody; CD16 antibody; CD19 antibody; CD20 antibody; CD21 antibody; CD22 antibody; CD25 antibody; CD28 antibody; CD34 antibody; CD35 antibody; CD40 antibody; CD45RA antibody; CD45RO antibody; CD52 antibody; CD56 antibody; CD62L antibody; CD68 antibody; CD80 antibody; CD95 antibody; CD117 antibody; CD127 antibody; CD133 antibody; CD137 (4-1 BB) antibody; CD163 antibody; F4/80 antibody; IL-4Ra antibody; Sca-1 antibody; CTLA-4 antibody; GITR antibody GARP antibody; LAP antibody; granzyme B antibody; LFA-1 antibody; MR1 antibody; uPAR antibody; or transferrin receptor antibody.

[0330] In some embodiments, a CAR binding domain binds to a cell surface antigen of a cell. In some embodiments, a cell surface antigen is characteristic of one type of cell. In some embodiments, a cell surface antigen is characteristic of more than one type of cell.

[0331] In some embodiments, the antigen binding domain of the CAR targets an antigen characteristic of a T cell. In some embodiments, the antigen characteristic of a T cell is selected from a cell surface receptor, a membrane transport protein (e.g., an active or passive transport protein such as, for example, an ion channel protein, a pore-forming protein, etc.), a transmembrane receptor, a membrane enzyme, and/or a cell adhesion protein characteristic of a T cell. In some embodiments, an antigen characteristic of a T cell may be a G protein-coupled receptor, receptor tyrosine kinase, tyrosine kinase associated receptor, receptor-like tyrosine phosphatase, receptor serine/threonine kinase, receptor guanylyl cyclase, histidine kinase associated receptor, AKT1; AKT2; AKT3; ATF2; BCL10; CALM1; CD3D (CD3δ); CD3E (CD3ε); CD3G (CD3γ); CD4; CD8; CD28; CD45; CD80 (B7-1); CD86 (B7-2); CD247 (CD3ζ); CTLA4 (CD152); ELK1; ERK1 (MAPK3); ERK2; FOS; FYN; GRAP2 (GADS); GRB2; HLA-DRA; HLA-DRB1; HLA-DRB3; HLA-DRB4; HLA-DRB5; HRAS; IKBKA (CHUK); IKBKB; IKBKE; IKBKG (NEMO); IL2; ITPR1; ITK; JUN; KRAS2; LAT; LCK; MAP2K1 (MEK1); MAP2K2 (MEK2); MAP2K3 (MKK3); MAP2K4 (MKK4); MAP2K6 (MKK6); MAP2K7 (MKK7); MAP3K1 (MEKK1); MAP3K3; MAP3K4; MAP3K5; MAP3K8; MAP3K14 (NIK); MAPK8 (JNK1); MAPK9 (JNK2); MAPK10 (JNK3); MAPK11 (p38β); MAPK12 (p38γ); MAPK13 (p38δ); MAPK14 (p38a); NCK; NFAT1; NFAT2; NFKB1; NFKB2; NFKBIA; NRAS; PAK1; PAK2; PAK3; PAK4; PIK3C2B; PIK3C3 (VPS34); PIK3CA; PIK3CB; PIK3CD; PIK3R1; PKCA; PKCB; PKCM; PKCQ; PLCY1; PRF1 (Perforin); PTEN; RAC1; RAF1; RELA; SDF1; SHP2; SLP76; SOS; SRC; TBK1; TCRA; TEC; TRAF6; VAV1; VAV2; or ZAP70.

[0332] In some embodiments, the antigen binding domain of the CAR targets an antigen characteristic of a disorder. In some embodiments, the disease or disorder is associates with CD4+ T cells. In some embodiments, the disease or disorder is associated with CD8+ T cells.

[0333] In some embodiments, the CAR transmembrane domain comprises at least a transmembrane region of the alpha, beta or zeta chain of a T cell receptor, CD28, CD3 epsilon, CD45, CD4, CD5, CD8, CD9, CD16, CD22, CD33, CD37, CD64, CD80, CD86, CD134, CD137, CD154, or functional variant thereof. In some embodiments, the transmembrane domain comprises at least a transmembrane region(s) of CD8α, CD8β, 4-1BB/CD137, CD28, CD34, CD4, FcεRIγ, CD16, OX40/CD134, CD3ζ, CD3ε, CD3γ, CD3δ, TCRα, TCRβ, TCRζ, CD32, CD64, CD64, CD45, CD5, CD9, CD22, CD37, CD80, CD86, CD40, CD40L/CD154, VEGFR2, FAS, and FGFR2B, or functional variant thereof.

[0334] In some embodiments, the CAR comprises at least one signaling domain selected from one or more of B7-1/CD80; B7-2/CD86; B7-H1/PD-L1; B7-H2; B7-H3; B7-H4; B7-H6; B7-H7; BTLA/CD272; CD28; CTLA-4; Gi24/VISTA/B7-H5; ICOS/CD278; PD-1; PD-L2/B7-DC; PDCD6); 4-1BB/TNFSF9/CD137; 4-1BB Ligand/TNFSF9; BAFF/BLyS/TNFSF13B; BAFF R/TNFRSF13C; CD27/TNFRSF7; CD27 Ligand/TNFSF7; CD30/TNFRSF8; CD30 Ligand/TNFSF8; CD40/TNFRSF5; CD40/TNFSF5; CD40 Ligand/TNFSF5; DR3/TNFRSF25; GITR/TNFRSF18; GITR Ligand/TNFSF18; HVEM/TNFRSF14; LIGHT/TNFSF14; Lymphotoxin-alpha/TNF-beta; OX40/TNFRSF4; OX40 Ligand/TNFSF4; RELT/TNFRSF19L; TACI/TNFRSF13B; TL1A/TNFSF15; TNF-alpha; TNF RII/TNFRSF1B); 2B4/CD244/SLAMF4; BLAME/SLAMF8; CD2; CD2F-10/SLAMF9; CD48/SLAMF2; CD58/LFA-3; CD84/SLAMF5; CD229/SLAMF3; CRACC/SLAMF7; NTB-A/SLAMF6; SLAM/CD150); CD2; CD7; CD53; CD82/Kai-1; CD90/Thy1; CD96; CD160; CD200; CD300a/LMIR1; HLA Class I; HLA-DR; Ikaros; Integrin alpha 4/CD49d; Integrin alpha 4 beta 1; Integrin alpha 4 beta 7/LPAM-1; LAG-3; TCL1A; TCL1B; CRTAM; DAP12; Dectin-1/CLEC7A; DPPIV/CD26; EphB6; TIM-1/KIM-1/HAVCR; TIM-4; TSLP; TSLP R; lymphocyte function associated antigen-1 (LFA-1); NKG2C, a CD3 zeta domain, an immunoreceptor tyrosine-based activation motif (ITAM), CD27, CD28, 4-1BB, CD134/OX40, CD30, CD40, PD-1, ICOS, lymphocyte function-associated antigen-1 (LFA-1), CD2, CD7, LIGHT, NKG2C, B7-H3, a ligand that specifically binds with CD83, or functional fragment thereof.

[0335] In some embodiments, the CAR comprises a CD3 zeta domain or an immunoreceptor tyrosine-based activation motif (ITAM), or functional variant thereof. In some embodiments, the CAR comprises (i) a CD3 zeta domain, or an immunoreceptor tyrosine-based activation motif (ITAM), or functional variant thereof; and (ii) a CD28 domain, or a 4-1BB domain, or functional variant thereof. In some embodiments, the CAR comprises a (i) a CD3 zeta domain, or an immunoreceptor tyrosine-based activation motif (ITAM), or functional variant thereof; (ii) a CD28 domain or functional variant thereof; and (iii) a 4-1BB domain, or a CD134 domain, or functional variant thereof. In some embodiments, the CAR comprises (i) a CD3 zeta domain, or an immunoreceptor tyrosine-based activation motif (ITAM), or functional variant thereof; (ii) a CD28 domain, or a 4-1BB domain, or functional variant thereof, and/or (iii) a 4-1BB domain, or a CD134 domain, or functional variant thereof. In some embodiments, the CAR comprises a (i) a CD3 zeta domain, or an immunoreceptor tyrosine-based activation motif (ITAM), or functional variant thereof; (ii) a CD28 domain or functional variant thereof; (iii) a 4-1BB domain, or a CD134 domain, or functional variant thereof; and (iv) a cytokine or costimulatory ligand transgene.

[0336] In certain embodiments, the intracellular signaling domain comprises a CD28 transmembrane and signaling domain linked to a CD3 (e.g., CD3-zeta) intracellular domain. In some embodiments, the intracellular signaling domain comprises a chimeric CD28 and CD137 (4-1BB, TNFRSF9) co-stimulatory domains, linked to a CD3 zeta intracellular domain

[0337] In some embodiments, the CAR encompasses one or more, e.g., two or more, costimulatory domains and an activation domain, e.g., primary activation domain, in the cytoplasmic portion. Exemplary CARs include intracellular components of CD3-zeta, CD28, and 4-1BB.

[0338] In some embodiments the intracellular signaling domain includes intracellular components of a 4-1BB signaling domain and a CD3-zeta signaling domain. In some embodiments, the intracellular signaling domain includes intracellular components of a CD28 signaling domain and a CD3zeta signaling domain.

[0339] In some embodiments, the CAR comprises an extracellular antigen binding domain (e.g., antibody or antibody fragment, such as an scFv) that binds to an antigen (e.g. tumor antigen), a spacer (e.g. containing a hinge domain, such as any as described herein), a transmembrane domain (e.g. any as described herein), and an intracellular signaling domain (e.g. any intracellular signaling domain, such as a primary signaling domain or costimulatory signaling domain as described herein). In some embodiments, the intracellular signaling domain is or includes a primary cytoplasmic signaling domain. In some embodiments, the intracellular signaling domain additionally includes an intracellular signaling domain of a costimulatory molecule (e.g., a costimulatory domain). Examples of exemplary components of a CAR are described in Table 6. In provided aspects, the sequences of each component in a CAR can include any combination listed in Table 6.

TABLE 6
CAR components and Exemplary Sequences

| | | |
|---|---|---|
| | | SEQ |
| | | ID |
| Component | Sequence | NO |

Extracellular binding domain

| | | |
|---|---|---|
| Anti-CD19 | DIQMTQTTSSLSASLGDRVTISCRASQDISKY | 419 |
| scFv (FMC63) | LNWYQQKPDGTVKLLIYHTSRLHSGVPSRFS | |
| | GSGSGTDYSLTISNLEQEDIATYFCQQGNTLP | |
| | YTFGGGTKLEITGSTSGSGKPGSGEGSTKGE | |
| | VKLQESGPGLVAPSQSLSVTCTVSGVSLPDY | |
| | GVSWIRQPPRKGLEWLGVIWGSETTYYNSA | |
| | LKSRLTIIKDNSKSQVFLKMNSLQTDDTAIYY | |
| | CAKHYYYGGSYAMDYWGQGTSVTVSS | |
| Anti-CD19 | DIQMTQTTSSLSASLGDRVTISCRASQDISKY | 420 |
| scFv (FMC63) | LNWYQQKPDGTVKLLIYHTSRLHSGVPSRFS | |
| | GSGSGTDYSLTISNLEQEDIATYFCQQGNTLP | |
| | YTFGGGTKLEITGGGGSGGGGSGGGGSEVK | |
| | LQESGPGLVAPSQSLSVTCTVSGVSLPDYGV | |
| | SWIRQPPRKGLEWLGVIWGSETTYYNSALKS | |
| | RLTIIKDNSKSQVFLKMNSLQTDDTAIYYCA | |
| | KHYYYGGSYAMDYWGQGTSVTVSS | |

Spacer (e.g. hinge)

| | | |
|---|---|---|
| IgG4 Hinge | ESKYGPPCPPCP | 421 |
| CD8 Hinge | TTTPAPRPPTPAPTIASQPLSLRPE | 422 |
| CD28 | IEVMYPPPYLDNEKSNGTIIHVKGKHLCPSPL | 423 |
| | FPGPSKP | |

Transmembrane

| | | |
|---|---|---|
| CD8 | ACRPAAGGAVHTRGLDFACDIYIWAPLAGT | 424 |
| | CGVLLLSLVITLYC | |
| CD28 | FWVLVVVGGVLACYSLLVTVAFIIFWV | 425 |
| CD28 | FWVLVVVGGVLACYSLLVTVAFIIFWV | 426 |

Costimulatory domain

| | | |
|---|---|---|
| CD28 | RSKRSRLLHSDYMNMTPRRPGPTRKHYQPY | 427 |
| | APPRDFAAYRS | |
| 4-1BB | KRGRKKLLYIFKQPFMRPVQTTQEEDGCSCR | 428 |
| | FPEEEEGGCEL | |

Primary Signaling Domain

| | | |
|---|---|---|
| CD3zeta | RVKFSRSADAPAYQQGQNQLYNELNLGRRE | 429 |
| | EYDVLDKRRGRDPEMGGKPRRKNPQEGLY | |
| | NELQKDKMAEAYSEIGMKGERRRGKGHDG | |
| | LYQGLSTATKDTYDALHMQALPPR | |
| CD3zeta | RVKFSRSADAPAYKQGQNQLYNELNLGRRE | 430 |
| | EYDVLDKRRGRDPEMGGKPRRKNPQEGLY | |
| | NELQKDKMAEAYSEIGMKGERRRGKGHDG | |
| | LYQGLSTATKDTYDALHMQALPPR | |

[0340] In some embodiments, the CAR further comprises one or more spacers, e.g., wherein the spacer is a first spacer between the antigen binding domain and the transmembrane domain. In some embodiments, the first spacer includes at least a portion of an immunoglobulin constant region or variant or modified version thereof. In some embodiments, the spacer is a second spacer between the transmembrane domain and a signaling domain. In some embodiments, the second spacer is an oligopeptide, e.g., wherein the oligopeptide comprises glycine-serine doublets.

[0341] In addition to the CARs described herein, various chimeric antigen receptors and nucleotide sequences encoding the same are known and would be suitable for fusosomal delivery and reprogramming of target cells in vivo and in vitro as described herein. See, e.g., WO2013040557; WO2012079000; WO2016030414; Smith T, et al., Nature Nanotechnology. 2017. (DOI: 10.1038/NNANO.2017.57), the disclosures of which are herein incorporated by reference in their entirety.

[0342] In some embodiments a targeted lipid particle comprising a CAR or a nucleic acid encoding a CAR (e.g., a DNA, a gDNA, a cDNA, an RNA, a pre-MRNA, an mRNA, an miRNA, an siRNA, etc.) is delivered to a target cell. In some embodiments the target cell is an effector cell, e.g., a cell of the immune system that expresses one or more Fc receptors and mediates one or more effector functions. In some embodiments, a target cell may include, but may not be limited to, one or more of a monocyte, macrophage, neutrophil, dendritic cell, eosinophil, mast cell, platelet, large granular lymphocyte, Langerhans' cell, natural killer (NK) cell, T lymphocyte (e.g., T cell), a Gamma delta T cell, B lymphocyte (e.g., B cell) and may be from any organism including but not limited to humans, mice, rats, rabbits, and monkeys.

[0343] E. Methods of Generating Targeted Lipid Particles

[0344] Provided herein is a targeted lipid particle comprising a lipid bilayer, a lumen surrounded by the lipid bilayer, a targeted envelope protein, and a fusogen, in which the targeted envelope protein and fusogen are embedded within the lipid bilayer. In some embodiments, the targeted lipid particle can be a viral particle, a virus-like particle, a nanoparticle, a vesicle, an exosome, a dendrimer, a lentivirus, a viral vector, an enucleated cell, a microvesicle, a membrane vesicle, an extracellular membrane vesicle, a plasma membrane vesicle, a giant plasma membrane vesicle, an apoptotic body, a mitoparticle, a pyrenocyte, a lysosome, another membrane enclosed vesicle, or a lentiviral vector, a viral based particle, a virus like particle (VLP) or a cell derived particle.

[0345] I. Virus-Like Particles

[0346] Provided herein are targeted lipid particles that are derived from virus, such as viral particles or virus-like particles, including those derived from retroviruses or lentiviruses. In some embodiments, the targeted lipid particle's bilayer of amphipathic lipids is or comprises the viral envelope. In some embodiments, the targeted lipid particle's bilayer of amphipathic lipids is or comprises lipids derived from a producer cell. In some embodiments, the viral envelope may comprise a fusogen, e.g., a fusogen that is endogenous to the virus or a pseudotyped fusogen. In some embodiments, the targeted lipid particle's lumen or cavity comprises a viral nucleic acid, e.g., a retroviral nucleic acid, e.g., a lentiviral nucleic acid. In some embodiments, the viral nucleic acid may be a viral genome. In some embodiments, the targeted lipid particle further comprises one or more viral non-structural proteins, e.g., in its cavity or lumen. In some embodiments, the targeted lipid particles is or comprises a virus-like particle (VLP). In some embodiments, the VLP does not comprise an envelope. In some embodiments, the VLP comprises an envelope.

[0347] In some embodiments, the viral particle or virus-like particle, such as retrovirus or retrovirus-like particle, comprises one or more of gag polyprotein, polymerase (e.g., pol), integrase (e.g., a functional or non-functional variant), protease, and a fusogen. In some embodiments, the targeted lipid particle further comprises rev. In some embodiments, one or more of the aforesaid proteins are encoded in the retroviral genome, and in some embodiments, one or more of the aforesaid proteins are provided in trans, e.g., by a helper cell, helper virus, or helper plasmid. In some embodiments, the targeted lipid particle nucleic acid (e.g., retroviral nucleic acid) comprises one or more of the following nucleic acid sequences: 5′ LTR (e.g., comprising U5 and lacking a functional U3 domain), Psi packaging element (Psi), Central polypurine tract (cPPT) Promoter operatively linked to the payload gene, payload gene (optionally comprising an intron before the open reading frame), Poly A tail sequence, WPRE, and 3′ LTR (e.g., comprising U5 and lacking a functional U3). In some embodiments the targeted lipid particle nucleic acid further comprises one or more insulator element. In some embodiments, the recognition sites are situated between the poly A tail sequence and the WPRE.

[0348] In some embodiments, the targeted lipid particle comprises supramolecular complexes formed by viral proteins that self-assemble into capsids. In some embodiments, the targeted lipid particle is a viral particle or virus-like particle derived from viral capsids. In some embodiments, the targeted lipid particle is a viral particle or virus-like particle derived from viral nucleocapsids. In some embodiments, the targeted lipid particle comprises nucleocapsid-derived that retain the property of packaging nucleic acids. In some embodiments, the viral particles or virus-like particles comprises only viral structural glycoproteins. In some embodiments, the targeted lipid particle does not contain a viral genome.

[0349] In some embodiments, the targeted lipid particle packages nucleic acids from host cells during the expression process. In some embodiments, the nucleic acids do not encode any genes involved in virus replication. In particular embodiments, the targeted lipid particle is a virus-like particle, e.g. retrovirus-like particle such as a lentivirus-like particle, that is replication defective.

[0350] In some cases, the targeted lipid particle is a viral particle that is morphologically indistinguishable from the wild type infectious virus. In some embodiments, the viral particle presents the entire viral proteome as an antigen. In some embodiments, the viral particle presents only a portion of the proteome as an antigen.

[0351] In some embodiments, the viral particle or virus-like particle is produced utilizing proteins (e.g., envelope proteins) from a virus within the Paramyxoviridae family In some embodiments, the Paramyxoviridae family comprises members within the Henipavirus genus. In some embodiments, the Henipavirus is or comprises a Hendra (HeV) or a Nipah (NiV) virus. In particular embodiments, the viral particles or virus-like particles incorporate a targeted envelope protein and fusogen as described in Section I.A. and 1.B.

[0352] In some embodiments, viral particles or virus-like particles may be produced in multiple cell culture systems including bacteria, mammalian cell lines, insect cell lines, yeast and plant cells.

[0353] In some embodiments, the assembly of a viral particle or virus-like particle is initiated by binding of the core protein to a unique encapsidation sequence within the viral genome (e.g. UTR with stem-loop structure). In some embodiments, the interaction of the core with the encapsidation sequence facilitates oligomerization.

[0354] In some embodiments, the targeted lipid particle is a virus-like particle which comprises a sequence that is devoid of or lacking viral RNA may be the result of removing or eliminating the viral RNA from the sequence. In some embodiments, this may be achieved by using an endogenous packaging signal binding site on gag. In some embodiments, the endogenous packaging signal binding site is on pol. In some embodiments, the RNA which is to be delivered will contain a cognate packaging signal. In some embodiments, a heterologous binding domain (which is heterologous to gag) located on the RNA to be delivered, and a cognate binding site located on gag or pol, can be used to ensure packaging of the RNA to be delivered. In some embodiments, the heterologous sequence could be non-viral or it could be viral, in which case it may be derived from a different virus. In some embodiments, the vector particles could be used to deliver therapeutic RNA, in which case functional integrase and/or reverse transcriptase is not required. In some embodiments, the vector particles could also be used to deliver a therapeutic gene of interest, in which case pol is typically included.

a. Transfer Vectors

[0355] In some embodiments, the retroviral nucleic acid comprises one or more of (e.g., all of): a 5′ promoter (e.g., to control expression of the entire packaged RNA), a 5′ LTR (e.g., that includes R (polyadenylation tail signal) and/or U5 which includes a primer activation signal), a primer binding site, a psi packaging signal, a RRE element for nuclear export, a promoter directly upstream of the transgene to control transgene expression, a transgene (or other exogenous agent element), a polypurine tract, and a 3′ LTR (e.g., that includes a mutated U3, a R, and U5). In some embodiments, the retroviral nucleic acid further comprises one or more of a cPPT, a WPRE, and/or an insulator element.

[0356] A retrovirus typically replicates by reverse transcription of its genomic RNA into a linear double-stranded DNA copy and subsequently covalently integrates its genomic DNA into a host genome. Illustrative retroviruses suitable for use in particular embodiments, include, but are not limited to: Moloney murine leukemia virus (M-MuLV), Moloney murine sarcoma virus (MoMSV), Harvey murine sarcoma virus (HaMuSV), murine mammary tumor virus (MuMTV), gibbon ape leukemia virus (GaLV), feline leukemia virus (FLV), spumavirus, Friend murine leukemia virus, Murine Stem Cell Virus (MSCV) and Rous Sarcoma Virus (RSV), and lentivirus.

[0357] In some embodiments the retrovirus is a Gammaretrovirus. In some embodiments the retrovirus is an Epsilonretrovirus. In some embodiments the retrovirus is an Alpharetrovirus. In some embodiments the retrovirus is a Betaretrovirus. In some embodiments the retrovirus is a Deltaretrovirus. In some embodiments the retrovirus is a Lentivirus. In some embodiments the retrovirus is a Spumaretrovirus. In some embodiments the retrovirus is an endogenous retrovirus.

[0358] Illustrative lentiviruses include, but are not limited to: HIV (human immunodeficiency virus; including HIV type 1, and HIV type 2); visna-maedi virus (VMV) virus; the caprine arthritis-encephalitis virus (CAEV); equine infectious anemia virus (EIAV); feline immunodeficiency virus (FIV); bovine immune deficiency virus (BIV); and simian immunodeficiency virus (SIV). In some embodiments, HIV based vector backbones (i.e., HIV cis-acting sequence elements) are used.

[0359] In some embodiments, a vector herein is a nucleic acid molecule capable transferring or transporting another nucleic acid molecule. The transferred nucleic acid is generally linked to, e.g., inserted into, the vector nucleic acid molecule. A vector may include sequences that direct autonomous replication in a cell, or may include sequences sufficient to allow integration into host cell DNA. Useful vectors include, for example, plasmids (e.g., DNA plasmids or RNA plasmids), transposons, cosmids, bacterial artificial chromosomes, and viral vectors. Useful viral vectors include, e.g., replication defective retroviruses and lentiviruses.

[0360] In some embodiments, a viral vector comprises a nucleic acid molecule (e.g., a transfer plasmid) that includes virus-derived nucleic acid elements that typically facilitate transfer of the nucleic acid molecule or integration into the genome of a cell or to a viral particle that mediates nucleic acid transfer. Viral particles will typically include various viral components and sometimes also host cell components in addition to nucleic acid(s). In some embodiments, a viral vector comprises e.g., a virus or viral particle capable of transferring a nucleic acid into a cell, or to the transferred nucleic acid (e.g., as naked DNA). In some embodiments, a viral vectors and transfer plasmids comprise structural and/or functional genetic elements that are primarily derived from a virus. A retroviral vector can comprise a viral vector or plasmid containing structural and functional genetic elements, or portions thereof, that are primarily derived from a retrovirus. A lentiviral vector can comprise a viral vector or plasmid containing structural and functional genetic elements, or portions thereof, including LTRs that are primarily derived from a lentivirus.

[0361] In embodiments, a lentiviral vector (e.g., lentiviral expression vector) may comprise a lentiviral transfer plasmid (e.g., as naked DNA) or an infectious lentiviral particle. With respect to elements such as cloning sites, promoters, regulatory elements, heterologous nucleic acids, etc., it is to be understood that the sequences of these elements can be present in RNA form in lentiviral particles and can be present in DNA form in DNA plasmids.

[0362] In some embodiments, in the vectors described herein at least part of one or more protein coding regions that contribute to or are essential for replication may be absent compared to the corresponding wild-type virus. In some embodiments, the viral vector replication-defective. In some embodiments, the vector is capable of transducing a target non-dividing host cell and/or integrating its genome into a host genome.

[0363] In some embodiments, the structure of a wild-type retrovirus genome often comprises a 5′ long terminal repeat (LTR) and a 3′ LTR, between or within which are located a packaging signal to enable the genome to be packaged, a primer binding site, integration sites to enable integration into a host cell genome and gag, pol and env genes encoding the packaging components which promote the assembly of viral particles. More complex retroviruses have additional features, such as rev and RRE sequences in HIV, which enable the efficient export of RNA transcripts of the integrated provirus from the nucleus to the cytoplasm of an infected target cell. In the provirus, the viral genes are flanked at both ends by regions called long terminal repeats (LTRs). In some embodiments, the LTRs are involved in proviral integration and transcription. In some embodiments, LTRs serve as enhancer-promoter sequences and can control the expression of the viral genes. In some embodiments, encapsidation of the retroviral RNAs occurs by virtue of a psi sequence located at the 5′ end of the viral genome.

[0364] In some embodiments, LTRs are similar sequences that can be divided into three elements, which are called U3, R and U5. U3 is derived from the sequence unique to the 3′ end of the RNA. R is derived from a sequence repeated at both ends of the RNA and U5 is derived from the sequence unique to the 5′ end of the RNA. The sizes of the three elements can vary considerably among different retroviruses.

[0365] In some embodiments, for the viral genome, the site of transcription initiation is typically at the boundary between U3 and R in one LTR and the site of poly (A) addition (termination) is at the boundary between R and U5 in the other LTR. U3 contains most of the transcriptional control elements of the provirus, which include the promoter and multiple enhancer sequences responsive to cellular and in some cases, viral transcriptional activator proteins. In some embodiments, retroviruses comprise any one or more of the following genes that code for proteins that are involved in the regulation of gene expression: tat, rev, tax and rex.

[0366] In some embodiments, the structural genes gag, pol and env, gag encodes the internal structural protein of the virus. In some embodiments, Gag protein is proteolytically processed into the mature proteins MA (matrix), CA (capsid) and NC (nucleocapsid). In some embodiments, the pol gene encodes the reverse transcriptase (RT), which contains DNA polymerase, associated RNase H and integrase (IN), which mediate replication of the genome. In some embodiments, the env gene encodes the surface (SU) glycoprotein and the transmembrane (TM) protein of the virion, which form a complex that interacts specifically with cellular receptor proteins. In some embodiments, the interaction promotes infection by fusion of the viral membrane with the cell membrane.

[0367] In some embodiments, a replication-defective retroviral vector genome gag, pol and env may be absent or not functional. In some embodiments, the R regions at both ends of the RNA are typically repeated sequences. In some embodiments, U5 and U3 represent unique sequences at the 5′ and 3′ ends of the RNA genome respectively.

[0368] In some embodiments, retroviruses may also contain additional genes which code for proteins other than gag, pol and env. Examples of additional genes include (in HIV), one or more of vif, vpr, vpx, vpu, tat, rev and nef. EIAV has (amongst others) the additional gene S2. In some embodiments, proteins encoded by additional genes serve various functions, some of which may be duplicative of a function provided by a cellular protein. In EIAV, for example, tat acts as a transcriptional activator of the viral LTR (Derse and Newbold 1993 Virology 194:530-6; Maury et al. 1994 Virology 200:632-42). It binds to a stable, stem-loop RNA secondary structure referred to as TAR. Rev regulates and co-ordinates the expression of viral genes through rev-response elements (RRE) (Martarano et al. 1994 J. Virol. 68:3102-11).

[0369] In some embodiments, in addition to protease, reverse transcriptase and integrase, non-primate lentiviruses contain a fourth pol gene product which codes for a dUTPase. In some embodiments, this a role in the ability of these lentiviruses to infect certain non-dividing or slowly dividing cell types.

[0370] In embodiments, a recombinant lentiviral vector (RLV) is a vector with sufficient retroviral genetic information to allow packaging of an RNA genome, in the presence of packaging components, into a viral particle capable of infecting a target cell. In some embodiments, infection of the target cell can comprise reverse transcription and integration into the target cell genome. In some embodiments, the RLV typically carries non-viral coding sequences which are to be delivered by the vector to the target cell. In some embodiments, an RLV is incapable of independent replication to produce infectious retroviral particles within the target cell. In some embodiments, the RLV lacks a functional gag-pol and/or env gene and/or other genes involved in replication. In some embodiments, the vector may be configured as a split-intron vector, e.g., as described in PCT patent application WO 99/15683, which is herein incorporated by reference in its entirety.

[0371] In some embodiments, the lentiviral vector comprises a minimal viral genome, e.g., the viral vector has been manipulated so as to remove the non-essential elements and to retain the essential elements in order to provide the required functionality to infect, transduce and deliver a nucleotide sequence of interest to a target host cell, e.g., as described in WO 98/17815, which is herein incorporated by reference in its entirety.

[0372] In some embodiments, a minimal lentiviral genome may comprise, e.g., (5′)R-U5-one or more first nucleotide sequences-U3-R(3′). In some embodiments, the plasmid vector used to produce the lentiviral genome within a source cell can also include transcriptional regulatory control sequences operably linked to the lentiviral genome to direct transcription of the genome in a source cell. In some embodiments, the regulatory sequences may comprise the natural sequences associated with the transcribed retroviral sequence, e.g., the 5′ U3 region, or they may comprise a heterologous promoter such as another viral promoter, for example the CMV promoter. In some embodiments, lentiviral genomes comprise additional sequences to promote efficient virus production. In some embodiments, in the case of HIV, rev and RRE sequences may be included. In some embodiments, alternatively or combination, codon optimization may be used, e.g., the gene encoding the exogenous agent may be codon optimized, e.g., as described in WO 01/79518, which is herein incorporated by reference in its entirety. In some embodiments, alternative sequences which perform a similar or the same function as the rev/RRE system may also be used. In some embodiments, a functional analogue of the rev/RRE system is found in the Mason Pfizer monkey virus. In some embodiments, this is known as CTE and comprises an RRE-type sequence in the genome which is believed to interact with a factor in the infected cell. The cellular factor can be thought of as a rev analogue. In some embodiments, CTE may be used as an alternative to the rev/RRE system. In some embodiments, the Rex protein of HTLV-I can functionally replace the Rev protein of HIV-I. Rev and Rex have similar effects to IRE-BP.

[0373] In some embodiments, a retroviral nucleic acid (e.g., a lentiviral nucleic acid, e.g., a primate or non-primate lentiviral nucleic acid) (1) comprises a deleted gag gene wherein the deletion in gag removes one or more nucleotides downstream of about nucleotide 350 or 354 of the gag coding sequence; (2) has one or more accessory genes absent from the retroviral nucleic acid; (3) lacks the tat gene but includes the leader sequence between the end of the 5′ LTR and the ATG of gag; and (4) combinations of (1), (2) and (3). In an embodiment the lentiviral vector comprises all of features (1) and (2) and (3). This strategy is described in more detail in WO 99/32646, which is herein incorporated by reference in its entirety.

[0374] In some embodiments, a primate lentivirus minimal system requires none of the HIV/SIV additional genes vif, vpr, vpx, vpu, tat, rev and nef for either vector production or for transduction of dividing and non-dividing cells. In some embodiments, an EIAV minimal vector system does not require S2 for either vector production or for transduction of dividing and non-dividing cells.

[0375] In some embodiments, the deletion of additional genes may permit vectors to be produced without the genes associated with disease in lentiviral (e.g. HIV) infections. In some embodiments, tat is associated with disease. In some embodiments, the deletion of additional genes permits the vector to package more heterologous DNA. In some embodiments, genes whose function is unknown, such as S2, may be omitted, thus reducing the risk of causing undesired effects. Examples of minimal lentiviral vectors are disclosed in WO 99/32646 and in WO 98/17815.

[0376] In some embodiments, the retroviral nucleic acid is devoid of at least tat and S2 (if it is an EIAV vector system), and possibly also vif, vpr, vpx, vpu and nef. In some embodiments, the retroviral nucleic acid is also devoid of rev, RRE, or both.

[0377] In some embodiments the retroviral nucleic acid comprises vpx. The Vpx polypeptide binds to and induces the degradation of the SAMHD1 restriction factor, which degrades free dNTPs in the cytoplasm. In some embodiments, the concentration of free dNTPs in the cytoplasm increases as Vpx degrades SAMHD1 and reverse transcription activity is increased, thus facilitating reverse transcription of the retroviral genome and integration into the target cell genome.

[0378] In some embodiments, different cells differ in their usage of particular codons. In some embodiments, this codon bias corresponds to a bias in the relative abundance of particular tRNAs in the cell type. In some embodiments, by altering the codons in the sequence so that they are tailored to match with the relative abundance of corresponding tRNAs, it is possible to increase expression. In some embodiments, it is possible to decrease expression by deliberately choosing codons for which the corresponding tRNAs are known to be rare in the particular cell type. In some embodiments, an additional degree of translational control is available. An additional description of codon optimization is found, e.g., in WO 99/41397, which is herein incorporated by reference in its entirety.

[0379] In some embodiments viruses, including HIV and other lentiviruses, use a large number of rare codons and by changing these to correspond to commonly used mammalian codons, increased expression of the packaging components in mammalian producer cells can be achieved.

[0380] In some embodiments, codon optimization has a number of other advantages. In some embodiments, by virtue of alterations in their sequences, the nucleotide sequences encoding the packaging components may have RNA instability sequences (INS) reduced or eliminated from them. At the same time, the amino acid sequence coding sequence for the packaging components is retained so that the viral components encoded by the sequences remain the same, or at least sufficiently similar that the function of the packaging components is not compromised. In some embodiments, codon optimization also overcomes the Rev/RRE requirement for export, rendering optimized sequences Rev independent. In some embodiments, codon optimization also reduces homologous recombination between different constructs within the vector system (for example between the regions of overlap in the gag-pol and env open reading frames). In some embodiments, codon optimization leads to an increase in viral titer and/or improved safety.

[0381] In some embodiments, only codons relating to INS are codon optimized. In other embodiments, the sequences are codon optimized in their entirety, with the exception of the sequence encompassing the frameshift site of gag-pol.

[0382] The gag-pol gene comprises two overlapping reading frames encoding the gag-pol proteins. The expression of both proteins depends on a frameshift during translation. This frameshift occurs as a result of ribosome “slippage” during translation. This slippage is thought to be caused at least in part by ribosome-stalling RNA secondary structures. Such secondary structures exist downstream of the frameshift site in the gag-pol gene. For HIV, the region of overlap extends from nucleotide 1222 downstream of the beginning of gag (wherein nucleotide 1 is the A of the gag ATG) to the end of gag (nt 1503). Consequently, a 281 bp fragment spanning the frameshift site and the overlapping region of the two reading frames is preferably not codon optimized. In some embodiments, retaining this fragment will enable more efficient expression of the gag-pol proteins. For EIAV, the beginning of the overlap is at nt 1262 (where nucleotide 1 is the A of the gag ATG). The end of the overlap is at nt 1461. In order to ensure that the frameshift site and the gag-pol overlap are preserved, the wild type sequence may be retained from nt 1156 to 1465.

[0383] In some embodiments, derivations from optimal codon usage may be made, for example, in order to accommodate convenient restriction sites, and conservative amino acid changes may be introduced into the gag-pol proteins.

[0384] In some embodiments, codon optimization is based on codons with poor codon usage in mammalian systems. The third and sometimes the second and third base may be changed.

[0385] In some embodiments, due to the degenerate nature of the genetic code, it will be appreciated that numerous gag-pol sequences can be achieved by a skilled worker. Also, there are many retroviral variants described which can be used as a starting point for generating a codon optimized gag-pol sequence. Lentiviral genomes can be quite variable. For example there are many quasi-species of HIV-I which are still functional. This is also the case for EIAV. These variants may be used to enhance particular parts of the transduction process. Examples of HIV-I variants may be found in the HIV databases maintained by Los Alamos National Laboratory. Details of EIAV clones may be found at the NCBI database maintained by the National Institutes of Health.

[0386] In some embodiments, the strategy for codon optimized gag-pol sequences can be used in relation to any retrovirus, e.g., EIAV, FIV, BIV, CAEV, VMR, SIV, HIV-I and HIV-2. In addition this method could be used to increase expression of genes from HTLV-I, HTLV-2, HFV, HSRV and human endogenous retroviruses (HERV), MLV and other retroviruses.

[0387] In embodiments, the retroviral vector comprises a packaging signal that comprises from 255 to 360 nucleotides of gag in vectors that still retain env sequences, or about 40 nucleotides of gag in a particular combination of splice donor mutation, gag and env deletions. In some embodiments, the retroviral vector includes a gag sequence which comprises one or more deletions, e.g., the gag sequence comprises about 360 nucleotides derivable from the N-terminus.

[0388] In some embodiments, the retroviral vector, helper cell, helper virus, or helper plasmid may comprise retroviral structural and accessory proteins, for example gag, pol, env, tat, rev, vif, vpr, vpu, vpx, or nef proteins or other retroviral proteins. In some embodiments the retroviral proteins are derived from the same retrovirus. In some embodiments the retroviral proteins are derived from more than one retrovirus, e.g. 2, 3, 4, or more retroviruses.

[0389] In some embodiments, the gag and pol coding sequences are generally organized as the Gag-Pol Precursor in native lentivirus. The gag sequence codes for a 55-kD Gag precursor protein, also called p55. The p55 is cleaved by the virally encoded protease (a product of the pol gene) during the process of maturation into four smaller proteins designated MA (matrix [p17]), CA (capsid [p24]), NC (nucleocapsid [p9]), and p6. The pol precursor protein is cleaved away from Gag by a virally encoded protease, and further digested to separate the protease (p10), RT (p50), RNase H (p15), and integrase (p31) activities.

[0390] In some embodiments, the lentiviral vector is integration-deficient. In some embodiments, the pol is integrase deficient, such as by encoding due to mutations in the integrase gene. For example, the pol coding sequence can contain an inactivating mutation in the integrase, such as by mutation of one or more of amino acids involved in catalytic activity, i.e. mutation of one or more of aspartic 64, aspartic acid 116 and/or glutamic acid 152. In some embodiments, the integrase mutation is a D64V mutation. In some embodiments, the mutation in the integrase allows for packaging of viral RNA into a lentivirus. In some embodiments, the mutation in the integrase allows for packaging of viral proteins into a letivirus. In some embodiments, the mutation in the integrase reduces the possibility of insertional mutagenesis. In some embodiments, the mutation in the integrase decreases the possibility of generating replication-competent recombinants (RCRs) (Wanisch et al. 2009. Mol Ther. 1798):1316-1332). In some embodiments, native Gag-Pol sequences can be utilized in a helper vector (e.g., helper plasmid or helper virus), or modifications can be made. These modifications include, chimeric Gag-Pol, where the Gag and Pol sequences are obtained from different viruses (e.g., different species, subspecies, strains, clades, etc.), and/or where the sequences have been modified to improve transcription and/or translation, and/or reduce recombination.

[0391] In some embodiments, the retroviral nucleic acid includes a polynucleotide encoding a 150-250 (e.g., 168) nucleotide portion of a gag protein that (i) includes a mutated INS1 inhibitory sequence that reduces restriction of nuclear export of RNA relative to wild-type INS1, (ii) contains two nucleotide insertion that results in frame shift and premature termination, and/or (iii) does not include INS2, INS3, and INS4 inhibitory sequences of gag.

[0392] In some embodiments, a vector described herein is a hybrid vector that comprises both retroviral (e.g., lentiviral) sequences and non-lentiviral viral sequences. In some embodiments, a hybrid vector comprises retroviral e.g., lentiviral, sequences for reverse transcription, replication, integration and/or packaging.

[0393] In some embodiments, most or all of the viral vector backbone sequences are derived from a lentivirus, e.g., HIV-1. However, it is to be understood that many different sources of retroviral and/or lentiviral sequences can be used or combined and numerous substitutions and alterations in certain of the lentiviral sequences may be accommodated without impairing the ability of a transfer vector to perform the functions described herein. A variety of lentiviral vectors are described in Naldini et al., (1996a, 1996b, and 1998); Zufferey et al., (1997); Dull et al., 1998, U.S. Pat. Nos. 6,013,516; and 5,994,136, many of which may be adapted to produce a retroviral nucleic acid.

[0394] In some embodiments, at each end of the provirus, long terminal repeats (LTRs) are typically found. An LTR typically comprises a domain located at the ends of retroviral nucleic acid which, in their natural sequence context, are direct repeats and contain U3, R and U5 regions. LTRs generally promote the expression of retroviral genes (e.g., promotion, initiation and polyadenylation of gene transcripts) and viral replication. The LTR can comprise numerous regulatory signals including transcriptional control elements, polyadenylation signals and sequences for replication and integration of the viral genome. The viral LTR is typically divided into three regions called U3, R and U5. The U3 region typically contains the enhancer and promoter elements. The U5 region is typically the sequence between the primer binding site and the R region and can contain the polyadenylation sequence. The R (repeat) region can be flanked by the U3 and U5 regions. The LTR is typically composed of U3, R and U5 regions and can appear at both the 5′ and 3′ ends of the viral genome. In some embodiments, adjacent to the 5′ LTR are sequences for reverse transcription of the genome (the tRNA primer binding site) and for efficient packaging of viral RNA into particles (the Psi site).

[0395] In some embodiments, a packaging signal can comprise a sequence located within the retroviral genome which mediate insertion of the viral RNA into the viral capsid or particle, see e.g., Clever et al., 1995. J. of Virology, Vol. 69, No. 4; pp. 2101-2109. Several retroviral vectors use a minimal packaging signal (a psi NI sequence) for encapsidation of the viral genome.

[0396] In various embodiments, retroviral nucleic acids comprise modified 5′ LTR and/or 3′ LTRs. Either or both of the LTR may comprise one or more modifications including, but not limited to, one or more deletions, insertions, or substitutions. Modifications of the 3′ LTR are often made to improve the safety of lentiviral or retroviral systems by rendering viruses replication-defective, e.g., virus that is not capable of complete, effective replication such that infective virions are not produced (e.g., replication-defective lentiviral progeny).

[0397] In some embodiments, a vector is a self-inactivating (SIN) vector, e.g., replication-defective vector, e.g., retroviral or lentiviral vector, in which the right (3′) LTR enhancer-promoter region, known as the U3 region, has been modified (e.g., by deletion or substitution) to prevent viral transcription beyond the first round of viral replication. This is because the right (3′) LTR U3 region can be used as a template for the left (5′) LTR U3 region during viral replication and, thus, absence of the U3 enhancer-promoter inhibits viral replication. In embodiments, the 3′ LTR is modified such that the U5 region is removed, altered, or replaced, for example, with an exogenous poly(A) sequence The 3′ LTR, the 5′ LTR, or both 3′ and 5′ LTRs, may be modified LTRs.

[0398] In some embodiments, the U3 region of the 5′ LTR is replaced with a heterologous promoter to drive transcription of the viral genome during production of viral particles. Examples of heterologous promoters which can be used include, for example, viral simian virus 40 (SV40) (e.g., early or late), cytomegalovirus (CMV) (e.g., immediate early), Moloney murine leukemia virus (MoMLV), Rous sarcoma virus (RSV), and herpes simplex virus (HSV) (thymidine kinase) promoters. In some embodiments, promoters are able to drive high levels of transcription in a Tat-independent manner. In certain embodiments, the heterologous promoter has additional advantages in controlling the manner in which the viral genome is transcribed. For example, the heterologous promoter can be inducible, such that transcription of all or part of the viral genome will occur only when the induction factors are present. Induction factors include, but are not limited to, one or more chemical compounds or the physiological conditions such as temperature or pH, in which the host cells are cultured.

[0399] In some embodiments, viral vectors comprise a TAR (trans-activation response) element, e.g., located in the R region of lentiviral (e.g., HIV) LTRs. This element interacts with the lentiviral trans-activator (tat) genetic element to enhance viral replication. However, this element is not required, e.g., in embodiments wherein the U3 region of the 5′ LTR is replaced by a heterologous promoter.

[0400] In some embodiments, the R region, e.g., the region within retroviral LTRs beginning at the start of the capping group (i.e., the start of transcription) and ending immediately prior to the start of the poly A tract can be flanked by the U3 and U5 regions. The R region plays a role during reverse transcription in the transfer of nascent DNA from one end of the genome to the other.

[0401] In some embodiments, the retroviral nucleic acid can also comprise a FLAP element, e.g., a nucleic acid whose sequence includes the central polypurine tract and central termination sequences (cPPT and CTS) of a retrovirus, e.g., HIV-1 or HIV-2. Suitable FLAP elements are described in U.S. Pat. No. 6,682,907 and in Zennou, et al., 2000, Cell, 101:173, which are herein incorporated by reference in their entireties. During HIV-1 reverse transcription, central initiation of the plus-strand DNA at the central polypurine tract (cPPT) and central termination at the central termination sequence (CTS) can lead to the formation of a three-stranded DNA structure: the HIV-1 central DNA flap. In some embodiments, the retroviral or lentiviral vector backbones comprise one or more FLAP elements upstream or downstream of the gene encoding the exogenous agent. For example, in some embodiments a transfer plasmid includes a FLAP element, e.g., a FLAP element derived or isolated from HIV-1.

[0402] In embodiments, a retroviral or lentiviral nucleic acid comprises one or more export elements, e.g., a cis-acting post-transcriptional regulatory element which regulates the transport of an RNA transcript from the nucleus to the cytoplasm of a cell. Examples of RNA export elements include, but are not limited to, the human immunodeficiency virus (HIV) rev response element (RRE) (see e.g., Cullen et al., 1991. J. Virol. 65: 1053; and Cullen et al., 1991. Cell 58: 423), and the hepatitis B virus post-transcriptional regulatory element (HPRE), which are herein incorporated by reference in their entireties. Generally, the RNA export element is placed within the 3′ UTR of a gene, and can be inserted as one or multiple copies.

[0403] In some embodiments, expression of heterologous sequences in viral vectors is increased by incorporating one or more of, e.g., all of, posttranscriptional regulatory elements, polyadenylation sites, and transcription termination signals into the vectors. A variety of posttranscriptional regulatory elements can increase expression of a heterologous nucleic acid at the protein, e.g., woodchuck hepatitis virus posttranscriptional regulatory element (WPRE; Zufferey et al., 1999, J. Virol., 73:2886); the posttranscriptional regulatory element present in hepatitis B virus (HPRE) (Huang et al., Mol. Cell. Biol., 5:3864); and the like (Liu et al., 1995, Genes Dev., 9:1766), each of which is herein incorporated by reference in its entirety. In some embodiments, a retroviral nucleic acid described herein comprises a posttranscriptional regulatory element such as a WPRE or HPRE.

[0404] In some embodiments, a retroviral nucleic acid described herein lacks or does not comprise a posttranscriptional regulatory element such as a WPRE or HPRE.

[0405] In some embodiments, elements directing the termination and polyadenylation of the heterologous nucleic acid transcripts may be included, e.g., to increases expression of the exogenous agent. Transcription termination signals may be found downstream of the polyadenylation signal. In some embodiments, vectors comprise a polyadenylation sequence 3′ of a polynucleotide encoding the exogenous agent. A polyA site may comprise a DNA sequence which directs both the termination and polyadenylation of the nascent RNA transcript by RNA polymerase II. Polyadenylation sequences can promote mRNA stability by addition of a polyA tail to the 3′ end of the coding sequence and thus, contribute to increased translational efficiency. Illustrative examples of polyA signals that can be used in a retroviral nucleic acid, include AATAAA, ATTAAA, AGTAAA, a bovine growth hormone polyA sequence (BGHpA), a rabbit β-globin polyA sequence (rβgpA), or another suitable heterologous or endogenous polyA sequence.

[0406] In some embodiments, a retroviral or lentiviral vector further comprises one or more insulator elements, e.g., an insulator element described herein.

[0407] In various embodiments, the vectors comprise a promoter operably linked to a polynucleotide encoding an exogenous agent. The vectors may have one or more LTRs, wherein either LTR comprises one or more modifications, such as one or more nucleotide substitutions, additions, or deletions. The vectors may further comprise one of more accessory elements to increase transduction efficiency (e.g., a cPPT/FLAP), viral packaging (e.g., a Psi (Ψ) packaging signal, RRE), and/or other elements that increase exogenous gene expression (e.g., poly (A) sequences), and may optionally comprise a WPRE or HPRE.

[0408] In some embodiments, a lentiviral nucleic acid comprises one or more of, e.g., all of, e.g., from 5′ to 3′, a promoter (e.g., CMV), an R sequence (e.g., comprising TAR), a U5 sequence (e.g., for integration), a PBS sequence (e.g., for reverse transcription), a DIS sequence (e.g., for genome dimerization), a psi packaging signal, a partial gag sequence, an RRE sequence (e.g., for nuclear export), a cPPT sequence (e.g., for nuclear import), a promoter to drive expression of the exogenous agent, a gene encoding the exogenous agent, a WPRE sequence (e.g., for efficient transgene expression), a PPT sequence (e.g., for reverse transcription), an R sequence (e.g., for polyadenylation and termination), and a U5 signal (e.g., for integration).

b. Packaging Vectors and Producer Cells

[0409] Large scale viral particle production is often useful to achieve a desired viral titer. Viral particles can be produced by transfecting a transfer vector into a packaging cell line that comprises viral structural and/or accessory genes, e.g., gag, pol, env, tat, rev, vif, vpr, vpu, vpx, or nef genes or other retroviral genes.

[0410] In some embodiments, the packaging vector is an expression vector or viral vector that lacks a packaging signal and comprises a polynucleotide encoding one, two, three, four or more viral structural and/or accessory genes. Typically, the packaging vectors are included in a producer cell, and are introduced into the cell via transfection, transduction or infection. A retroviral, e.g., lentiviral, transfer vector can be introduced into a producer cell line, via transfection, transduction or infection, to generate a source cell or cell line. The packaging vectors can be introduced into human cells or cell lines by standard methods including, e.g., calcium phosphate transfection, lipofection or electroporation. In some embodiments, the packaging vectors are introduced into the cells together with a dominant selectable marker, such as neomycin, hygromycin, puromycin, blastocidin, zeocin, thymidine kinase, DHFR, Gln synthetase or ADA, followed by selection in the presence of the appropriate drug and isolation of clones. A selectable marker gene can be linked physically to genes encoding by the packaging vector, e.g., by IRES or self-cleaving viral peptides.

[0411] In some embodiments, producer cell lines include cell lines that do not contain a packaging signal, but do stably or transiently express viral structural proteins and replication enzymes (e.g., gag, pol and env) which can package viral particles. Any suitable cell line can be employed, e.g., mammalian cells, e.g., human cells. Suitable cell lines which can be used include, for example, CHO cells, BHK cells, MDCK cells, C3H 10T1/2 cells, FLY cells, Psi-2 cells, BOSC 23 cells, PA317 cells, WEHI cells, COS cells, BSC 1 cells, BSC 40 cells, BMT 10 cells, VERO cells, W138 cells, MRCS cells, A549 cells, HT1080 cells, 293 cells, 293T cells, B-50 cells, 3T3 cells, NIH3T3 cells, HepG2 cells, Saos-2 cells, Huh7 cells, HeLa cells, W163 cells, 211 cells, and 211A cells. In embodiments, the packaging cells are 293 cells, 293T cells, or A549 cells.

[0412] In some embodiments, a source cell line includes a cell line which is capable of producing recombinant retroviral particles, comprising a producer cell line and a transfer vector construct comprising a packaging signal. Methods of preparing viral stock solutions are illustrated by, e.g., Y. Soneoka et al. (1995) Nucl. Acids Res. 23:628-633, and N. R. Landau et al. (1992) J. Virol. 66:5110-5113, which are incorporated herein by reference. Infectious virus particles may be collected from the producer cells, e.g., by cell lysis, or collection of the supernatant of the cell culture. Optionally, the collected virus particles may be enriched or purified.

[0413] In some embodiments, the source cell comprises one or more plasmids coding for viral structural proteins and replication enzymes (e.g., gag, pol and env) which can package viral particles. In some embodiments, the sequences coding for at least two of the gag, pol, and env precursors are on the same plasmid. In some embodiments, the sequences coding for the gag, pol, and env precursors are on different plasmids. In some embodiments, the sequences coding for the gag, pol, and env precursors have the same expression signal, e.g., promoter. In some embodiments, the sequences coding for the gag, pol, and env precursors have a different expression signal, e.g., different promoters. In some embodiments, expression of the gag, pol, and env precursors is inducible. In some embodiments, the plasmids coding for viral structural proteins and replication enzymes are transfected at the same time or at different times. In some embodiments, the plasmids coding for viral structural proteins and replication enzymes are transfected at the same time or at a different time from the packaging vector.

[0414] In some embodiments, the source cell line comprises one or more stably integrated viral structural genes. In some embodiments expression of the stably integrated viral structural genes is inducible.

[0415] In some embodiments, expression of the viral structural genes is regulated at the transcriptional level. In some embodiments, expression of the viral structural genes is regulated at the translational level. In some embodiments, expression of the viral structural genes is regulated at the post-translational level.

[0416] In some embodiments, expression of the viral structural genes is regulated by a tetracycline (Tet)-dependent system, in which a Tet-regulated transcriptional repressor (Tet-R) binds to DNA sequences included in a promoter and represses transcription by steric hindrance (Yao et al, 1998; Jones et al, 2005). Upon addition of doxycycline (dox), Tet-R is released, allowing transcription. Multiple other suitable transcriptional regulatory promoters, transcription factors, and small molecule inducers are suitable to regulate transcription of viral structural genes.

[0417] In some embodiments, the third-generation lentivirus components, human immunodeficiency virus type 1 (HIV) Rev, Gag/Pol, and an envelope under the control of Tet-regulated promoters and coupled with antibiotic resistance cassettes are separately integrated into the source cell genome. In some embodiments the source cell only has one copy of each of Rev, Gag/Pol, and an envelope protein integrated into the genome.

[0418] In some embodiments a nucleic acid encoding the exogenous agent (e.g., a retroviral nucleic acid encoding the exogenous agent) is also integrated into the source cell genome.

[0419] In some embodiments, a retroviral nucleic acid described herein is unable to undergo reverse transcription. Such a nucleic acid, in embodiments, is able to transiently express an exogenous agent. The retrovirus or VLP, may comprise a disabled reverse transcriptase protein, or may not comprise a reverse transcriptase protein. In embodiments, the retroviral nucleic acid comprises a disabled primer binding site (PBS) and/or att site. In embodiments, one or more viral accessory genes, including rev, tat, vif, nef, vpr, vpu, vpx and S2 or functional equivalents thereof, are disabled or absent from the retroviral nucleic acid. In embodiments, one or more accessory genes selected from S2, rev and tat are disabled or absent from the retroviral nucleic acid.

[0420] 2 Cell-Derived Particles

[0421] Provided herein are targeted lipid particles that comprise a naturally derived membrane. In some embodiments, the naturally derived membrane comprises membrane vesicles prepared from cells or tissues. In some embodiments, the targeted lipid particle comprises a vesicle that is obtainable from a cell. In some embodiments, the targeted lipid particle comprises a microvesicle, an exosome, a membrane enclosed body, an apoptotic body (from apoptotic cells), a particle (which may be derived from e.g. platelets), an ectosome (derivable from, e.g., neutrophiles and monocytes in serum), a prostatosome (obtainable from prostate cancer cells), or a cardiosome (derivable from cardiac cells).

[0422] In some embodiments, the source cell is an endothelial cell, a fibroblast, a blood cell (e.g., a macrophage, a neutrophil, a granulocyte, a leukocyte), a stem cell (e.g., a mesenchymal stem cell, an umbilical cord stem cell, bone marrow stem cell, a hematopoietic stem cell, an induced pluripotent stem cell e.g., an induced pluripotent stem cell derived from a subject's cells), an embryonic stem cell (e.g., a stem cell from embryonic yolk sac, placenta, umbilical cord, fetal skin, adolescent skin, blood, bone marrow, adipose tissue, erythropoietic tissue, hematopoietic tissue), a myoblast, a parenchymal cell (e.g., hepatocyte), an alveolar cell, a neuron (e.g., a retinal neuronal cell) a precursor cell (e.g., a retinal precursor cell, a myeloblast, myeloid precursor cells, a thymocyte, a meiocyte, a megakaryoblast, a promegakaryoblast, a melanoblast, a lymphoblast, a bone marrow precursor cell, a normoblast, or an angioblast), a progenitor cell (e.g., a cardiac progenitor cell, a satellite cell, a radial gial cell, a bone marrow stromal cell, a pancreatic progenitor cell, an endothelial progenitor cell, a blast cell), or an immortalized cell (e.g., HeEa, HEK293, MRC-5, WI-38, IMR 90, IMR 91, PER.C6, HT-1080, or BJ cell). In some embodiments, the source cell is other than a 293 cell, HEK cell, human endothelial cell, or a human epithelial cell, monocyte, macrophage, dendritic cell, or stem cell.

[0423] In some embodiments, the targeted lipid particle has a density of <1, 1-1.1, 1.05-1.15, 1.1-1.2, 1.15-1.25, 1.2-1.3, 1.25-1.35, or >1.35 g/ml. In some embodiments, the targeted lipid particle composition comprises less than 0.01%, 0.05%, 0.1%, 0.5%, 1%, 1.5%, 2%, 2.5%, 3%, 4%, 5%, or 10% source cells by protein mass or less than 0.01%, 0.05%, 0.1%, 0.5%, 1%, 1.5%, 2%, 2.5%, 3%, 4%, 5%, or 10% of cells having a functional nucleus.

[0424] In embodiments, the targeted lipid particle has a size, or the population of targeted lipid particles have an average size, that is less than about 0.01%, 0.05%, 0.1%, 0.5%, 1%, 2%, 3%, 4%, 5%, 10%, 20%, 30%, 40%, 50%, 60%, 70%, 80%, 90%, of that of the source cell.

[0425] In some embodiments the targeted lipid particle comprises an extracellular vesicle, e.g., a cell-derived vesicle comprising a membrane that encloses an internal space and has a smaller diameter than the cell from which it is derived. In embodiments the extracellular vesicle has a diameter from 20 nm to 1000 nm. In embodiments the targeted lipid particle comprises an apoptotic body, a fragment of a cell, a vesicle derived from a cell by direct or indirect manipulation, a vesiculated organelle, and a vesicle produced by a living cell (e.g., by direct plasma membrane budding or fusion of the late endosome with the plasma membrane). In embodiments the extracellular vesicle is derived from a living or dead organism, explanted tissues or organs, or cultured cells.

[0426] In embodiments, the targeted lipid particle comprises a nanovesicle, e.g., a cell-derived small (e.g., between 20-250 nm in diameter, or 30-150 nm in diameter) vesicle comprising a membrane that encloses an internal space, and which is generated from said cell by direct or indirect manipulation. The production of nanovesicles can, in some instances, result in the destruction of the source cell. The nanovesicle may comprise a lipid or fatty acid and polypeptide.

[0427] In embodiments, the targeted lipid particle comprises an exosome. In embodiments, the exosome is a cell-derived small (e.g., between 20-300 nm in diameter, or 40-200 nm in diameter) vesicle comprising a membrane that encloses an internal space, and which is generated from said cell by direct plasma membrane budding or by fusion of the late endosome with the plasma membrane. In embodiments, production of exosomes does not result in the destruction of the source cell. In embodiments, the exosome comprises lipid or fatty acid and polypeptide. Exemplary exosomes and other membrane-enclosed bodies are also described in WO/2017/161010, WO/2016/077639, US20160168572, US20150290343, and US20070298118, each of which is incorporated by reference herein in its entirety.

[0428] In some embodiments, the targeted lipid particle is derived from a source cell with a genetic modification which results in increased expression of an immunomodulatory agent. In some embodiments, the immunosuppressive agent is on an exterior surface of the cell. In some embodiments, the immunosuppressive agent is incorporated into the exterior surface of the targeted lipid particle. In some embodiments, the targeted lipid particle comprises an immunomodulatory agent attached to the surface of the solid particle by a covalent or non-covalent bond.

[0429] c. A. Generation of Cell-Derived Particles

[0430] In some embodiments, targeted lipid particles are generated by inducing budding of an exosome, microvesicle, membrane vesicle, extracellular membrane vesicle, plasma membrane vesicle, giant plasma membrane vesicle, apoptotic body, mitoparticle, pyrenocyte, lysosome, or other membrane enclosed vesicle.

[0431] In some embodiments, targeted lipid particles are generated by inducing cell enucleation. Enucleation may be performed using assays such as genetic, chemical (e.g., using Actinomycin D, see Bayona-Bafaluyet al., “A chemical enucleation method for the transfer of mitochondrial DNA to p° cells” Nucleic Acids Res. 2003 Aug. 15; 31(16): e98), mechanical methods (e.g., squeezing or aspiration, see Lee et al., “A comparative study on the efficiency of two enucleation methods in pig somatic cell nuclear transfer: effects of the squeezing and the aspiration methods.” Anim Biotechnol. 2008; 19(2):71-9), or combinations thereof.

[0432] In some embodiments, the targeted lipid particles are generated by inducing cell fragmentation. In some embodiments, cell fragmentation can be performed using the following methods, including, but not limited to: chemical methods, mechanical methods (e.g., centrifugation (e.g., ultracentrifugation, or density centrifugation), freeze-thaw, or sonication), or combinations thereof.

[0433] In some embodiments, the targeted lipid particle is a microvesicle. In some embodiments the microvesicle has a diameter of about 100 nm to about 2000 nm. In some embodiments, a targeted lipid particle comprises a cell ghost. In some embodiments, a vesicle is a plasma membrane vesicle, e.g. a giant plasma membrane vesicle.

[0434] In some embodiments, the source cell used to make the targeted lipid particle will not be available for testing after the targeted lipid particle is made.

[0435] In some embodiments, a characteristic of a targeted lipid particle is described by comparison to a reference cell. In embodiments, the reference cell is the source cell. In embodiments, the reference cell is a HeLa, HEK293, HFF-1, MRC-5, WI-38, IMR 90, IMR 91, PER.C6, HT-1080, or BJ cell. In some embodiments, a characteristic of a population of targeted lipid particle is described by comparison to a population of reference cells, e.g., a population of source cells, or a population of HeLa, HEK293, MRC-5, WI-38, IMR 90, IMR 91, PER.C6, HT-1080, or BJ cells.

### III. PHARMACEUTICAL COMPOSITIONS

[0436] The present disclosure also provides, in some aspects, a pharmaceutical composition comprising the targeted lipid particle composition described herein and pharmaceutically acceptable carrier. The pharmaceutical compositions can include any of the described targeted lipid particles.

[0437] In some embodiments, the targeted lipid particle meets a pharmaceutical or good manufacturing practices (GMP) standard. In some embodiments, the targeted lipid particle was made according to good manufacturing practices (GMP). In some embodiments, the targeted lipid particle has a pathogen level below a predetermined reference value, e.g., is substantially free of pathogens. In some embodiments, the targeted lipid particle has a contaminant level below a predetermined reference value, e.g., is substantially free of contaminants In some embodiments, the targeted lipid particle has low immunogenicity.

[0438] In some embodiments, provided herein are the use of pharmaceutical compositions of the invention or salts thereof to practice the methods of the invention. Such a pharmaceutical composition may consist of at least one compound or conjugate of the invention or a salt thereof in a form suitable for administration to a subject, or the pharmaceutical composition may comprise at least one compound or conjugate of the invention or a salt thereof, and one or more pharmaceutically acceptable carriers, one or more additional ingredients, or some combination of these. In some embodiments, the compound or conjugate of the invention may be present in the pharmaceutical composition in the form of a physiologically acceptable salt, such as in combination with a physiologically acceptable cation or anion, as is well known in the art.

[0439] In some embodiments, the pharmaceutical compositions useful for practicing the methods of the invention may be administered to deliver a dose of between 1 ng/kg/day and 100 mg/kg/day. In another embodiment, the pharmaceutical compositions useful for practicing the invention may be administered to deliver a dose of between 1 ng/kg/day and 500 mg/kg/day.

[0440] In some embodiments, the relative amounts of the active ingredient, the pharmaceutically acceptable carrier, and any additional ingredients in a pharmaceutical composition of the invention will vary, depending upon the identity, size, and condition of the subject treated and further depending upon the route by which the composition is to be administered. In some embodiments, the composition may comprise between 0.1% and 100% (w/w) active ingredient.

[0441] In some embodiments, pharmaceutical compositions that are useful in the methods of the invention may be suitably developed for oral, rectal, vaginal, parenteral, topical, pulmonary, intranasal, buccal, ophthalmic, or another route of administration. In some embodiments, a composition useful within the methods of the invention may be directly administered to the skin, vagina or any other tissue of a mammal. In some embodiments, formulations include liposomal preparations, resealed erythrocytes containing the active ingredient, and immunologically based formulations. In some embodiments, the route(s) of administration will be readily apparent to the skilled artisan and will depend upon any number of factors including the type and severity of the disease being treated, the type and age of the veterinary or human subject being treated, and the like.

[0442] In some embodiments, formulations of the pharmaceutical compositions described herein may be prepared by any method known or hereafter developed in the art of pharmacology. In some embodiments, preparatory methods include the step of bringing the active ingredient into association with a carrier or one or more other accessory ingredients, and then, if necessary or desirable, shaping or packaging the product into a desired single- or multi-dose unit.

[0443] In some embodiments, a “unit dose” is a discrete amount of the pharmaceutical composition comprising a predetermined amount of the active ingredient. In some embodiments, the amount of the active ingredient is generally equal to the dosage of the active ingredient that would be administered to a subject or a convenient fraction of such a dosage such as, for example, one-half or one-third of such a dosage. In some embodiments, the unit dosage form may be for a single daily dose or one of multiple daily doses (e.g., about 1 to 4 or more times per day). In some embodiments, when multiple daily doses are used, the unit dosage form may be the same or different for each dose.

[0444] In some embodiments, although the descriptions of pharmaceutical compositions provided herein are principally directed to pharmaceutical compositions that are suitable for ethical administration to humans, it will be understood by the skilled artisan that such compositions are generally suitable for administration to animals of all sorts. In some embodiments, modification of pharmaceutical compositions suitable for administration to humans in order to render the compositions suitable for administration to various animals is well understood, and the ordinarily skilled veterinary pharmacologist may design and perform such modification with merely ordinary, if any, experimentation. In some embodiments, subjects to which administration of the pharmaceutical compositions of the invention is contemplated include humans and other primates, mammals including commercially relevant mammals such as cattle, pigs, horses, sheep, cats, and dogs.

[0445] In some of any embodiments, the compositions of the invention are formulated using one or more pharmaceutically acceptable excipients or carriers. In one embodiment, the pharmaceutical compositions of the invention comprise a therapeutically effective amount of a compound or conjugate of the invention and a pharmaceutically acceptable carrier. In some embodiments, pharmaceutically acceptable carriers that are useful, include, but are not limited to, glycerol, water, saline, ethanol and other pharmaceutically acceptable salt solutions such as phosphates and salts of organic acids. Examples of these and other pharmaceutically acceptable carriers are described in Remington's Pharmaceutical Sciences (1991, Mack Publication Co., New Jersey).

[0446] In some embodiments, the carrier may be a solvent or dispersion medium containing, for example, water, ethanol, polyol (for example, glycerol, propylene glycol, and liquid polyethylene glycol, and the like), suitable mixtures thereof, and vegetable oils. In some embodiments, the proper fluidity may be maintained, for example, by the use of a coating such as lecithin, by the maintenance of the required particle size in the case of dispersion and by the use of surfactants. In some embodiments, prevention of the action of microorganisms may be achieved by various antibacterial and antifungal agents, for example, parabens, chlorobutanol, phenol, ascorbic acid, thimerosal, and the like. In some embodiments, it is preferable to include isotonic agents, for example, sugars, sodium chloride, or polyalcohols such as mannitol and sorbitol, in the composition. In some embodiments, prolonged absorption of the injectable compositions may be brought about by including in the composition an agent that delays absorption, for example, aluminum monostearate or gelatin. In one embodiment, the pharmaceutically acceptable carrier is not DMSO alone.

[0447] In some embodiments, formulations may be employed in admixtures with conventional excipients, i.e., pharmaceutically acceptable organic or inorganic carrier substances suitable for oral, vaginal, parenteral, nasal, intravenous, subcutaneous, enteral, or any other suitable mode of administration, known to the art. In some embodiments, the pharmaceutical preparations may be sterilized and if desired mixed with auxiliary agents, e.g., lubricants, preservatives, stabilizers, wetting agents, emulsifiers, salts for influencing osmotic pressure buffers, coloring, flavoring and/or aromatic substances and the like. In some embodiments, pharmaceutical preparations may also be combined where desired with other active agents, e.g., other analgesic agents.

[0448] In some embodiments, “additional ingredients” include, but are not limited to, one or more of the following: excipients; surface active agents; dispersing agents; inert diluents; granulating and disintegrating agents; binding agents; lubricating agents; sweetening agents; flavoring agents; coloring agents; preservatives; physiologically degradable compositions such as gelatin; aqueous vehicles and solvents; oily vehicles and solvents; suspending agents; dispersing or wetting agents; emulsifying agents, demulcents; buffers; salts; thickening agents; fillers; emulsifying agents; antioxidants; antibiotics; antifungal agents; stabilizing agents; and pharmaceutically acceptable polymeric or hydrophobic materials. In some embodiments, “additional ingredients” that may be included in the pharmaceutical compositions of the invention are known in the art and described, for example in Genaro, ed. (1985, Remington's Pharmaceutical Sciences, Mack Publishing Co., Easton, Pa.), which is incorporated herein by reference.

[0449] In some embodiments, the composition of the invention may comprise a preservative from about 0.005% to 2.0% by total weight of the composition. In some embodiments, the preservative is used to prevent spoilage in the case of exposure to contaminants in the environment. In some embodiments, examples of preservatives useful in accordance with the invention included but are not limited to those selected from the group consisting of benzyl alcohol, sorbic acid, parabens, imidurea and combinations thereof. In some embodiments, a particularly preferred preservative is a combination of about 0.5% to 2.0% benzyl alcohol and 0.05% to 0.5% sorbic acid.

[0450] In some embodiments, the composition preferably includes an anti-oxidant and a chelating agent that inhibits the degradation of the compound. In some embodiments, antioxidants for some compounds are BHT, BHA, alpha-tocopherol and ascorbic acid in the preferred range of about 0.01% to 0.3% and more preferably BHT in the range of 0.03% to 0.1% by weight by total weight of the composition. In some embodiments, the chelating agent is present in an amount of from 0.01% to 0.5% by weight by total weight of the composition. Particularly preferred chelating agents include edetate salts (e.g. disodium edetate) and citric acid in the weight range of about 0.01% to 0.20% and more preferably in the range of 0.02% to 0.10% by weight by total weight of the composition. In some embodiments, the chelating agent is useful for chelating metal ions in the composition that may be detrimental to the shelf life of the formulation. In some embodiments, other suitable and equivalent antioxidants and chelating agents may be substituted therefore as would be known to those skilled in the art.

[0451] In some embodiments, liquid suspensions may be prepared using conventional methods to achieve suspension of the active ingredient in an aqueous or oily vehicle. In some embodiments, aqueous vehicles include, for example, water, and isotonic saline. In some embodiments, oily vehicles include, for example, almond oil, oily esters, ethyl alcohol, vegetable oils such as arachis, olive, sesame, or coconut oil, fractionated vegetable oils, and mineral oils such as liquid paraffin. In some embodiments, liquid suspensions may further comprise one or more additional ingredients including, but not limited to, suspending agents, dispersing or wetting agents, emulsifying agents, demulcents, preservatives, buffers, salts, flavorings, coloring agents, and sweetening agents. In some embodiments, oily suspensions may further comprise a thickening agent. In some embodiments, suspending agents include, but are not limited to, sorbitol syrup, hydrogenated edible fats, sodium alginate, polyvinylpyrrolidone, gum tragacanth, gum acacia, and cellulose derivatives such as sodium carboxymethylcellulose, methylcellulose, hydroxypropylmethylcellulose. In some embodiments, dispersing or wetting agents include, but are not limited to, naturally-occurring phosphatides such as lecithin, condensation products of an alkylene oxide with a fatty acid, with a long chain aliphatic alcohol, with a partial ester derived from a fatty acid and a hexitol, or with a partial ester derived from a fatty acid and a hexitol anhydride (e.g., polyoxyethylene stearate, heptadecaethyleneoxycetanol, polyoxyethylene sorbitol monooleate, and polyoxyethylene sorbitan monooleate, respectively). Known emulsifying agents include, but are not limited to, lecithin, and acacia. Known preservatives include, but are not limited to, methyl, ethyl, or n-propyl-para-hydroxybenzoates, ascorbic acid, and sorbic acid. Known sweetening agents include, for example, glycerol, propylene glycol, sorbitol, sucrose, and saccharin. Known thickening agents for oily suspensions include, for example, beeswax, hard paraffin, and cetyl alcohol.

[0452] In some embodiments, liquid solutions of the active ingredient in aqueous or oily solvents may be prepared in substantially the same manner as liquid suspensions, the primary difference being that the active ingredient is dissolved, rather than suspended in the solvent. As used herein, an “oily” liquid is one which comprises a carbon-containing liquid molecule and which exhibits a less polar character than water. In some embodiments, liquid solutions of the pharmaceutical composition of the invention may comprise each of the components described with regard to liquid suspensions, it being understood that suspending agents will not necessarily aid dissolution of the active ingredient in the solvent. In some embodiments, aqueous solvents include, for example, water, and isotonic saline. In some embodiments, oily solvents include, for example, almond oil, oily esters, ethyl alcohol, vegetable oils such as arachis, olive, sesame, or coconut oil, fractionated vegetable oils, and mineral oils such as liquid paraffin.

[0453] In some embodiments, powdered and granular formulations of a pharmaceutical preparation of the invention may be prepared using known methods. In some embodiments, formulations may be administered directly to a subject, used, for example, to form tablets, to fill capsules, or to prepare an aqueous or oily suspension or solution by addition of an aqueous or oily vehicle thereto. In some of any embodiments, formulations may further comprise one or more of dispersing or wetting agent, a suspending agent, and a preservative. Additional excipients, such as fillers and sweetening, flavoring, or coloring agents, may also be included in these formulations.

[0454] In some embodiments, a pharmaceutical composition of the invention may also be prepared, packaged, or sold in the form of oil-in-water emulsion or a water-in-oil emulsion. In some embodiments, the oily phase may be a vegetable oil such as olive or arachis oil, a mineral oil such as liquid paraffin, or a combination of these. In some embodiments, compositions further comprise one or more emulsifying agents such as naturally occurring gums such as gum acacia or gum tragacanth, naturally-occurring phosphatides such as soybean or lecithin phosphatide, esters or partial esters derived from combinations of fatty acids and hexitol anhydrides such as sorbitan monooleate, and condensation products of such partial esters with ethylene oxide such as polyoxyethylene sorbitan monooleate. In some embodiments, emulsions may also contain additional ingredients including, for example, sweetening or flavoring agents.

### IV. METHODS OF TREATMENT

[0455] In some embodiments, the targeted lipid particles provided herein, or pharmaceutical compositions thereof as described herein can be administered to a subject, e.g. a mammal, e.g. a human. In such embodiments, the subject may be at risk of, may have a symptom of, or may be diagnosed with or identified as having, a particular disease or condition. In one embodiment, the subject has cancer. In one embodiment, the subject has an infectious disease. In some embodiments, the targeted lipid particle contains nucleic acid sequences encoding an exogenous agent for treating the disease or condition in the subject. For example, the exogenous agent is one that targets or is specific for a protein of a neoplastic cells and the targeted lipid particle is administered to a subject for treating a tumor or cancer in the subject. In another example, the exogenous agent is an inflammatory mediator or immune molecule, such as a cytokine, and targeted lipid particle is administered to a subject for treating any condition in which it is desired to modulate (e.g. increase) the immune response, such as a cancer or infectious disease. In some embodiments, the targeted lipid particle is administered in an effective amount or dose to effect treatment of the disease, condition or disorder. Provided herein are uses of any of the provided targeted lipid particles in such methods and treatments, and in the preparation of a medicament in order to carry out such therapeutic methods. In some embodiments, the methods are carried out by administering the targeted lipid particle or compositions comprising the same, to the subject having, having had, or suspected of having the disease or condition or disorder. In some embodiments, the methods thereby treat the disease or condition or disorder in the subject. Also provided herein are uses of any of the compositions, such as pharmaceutical compositions provided herein, for the treatment of a disease, condition or disorder associated with a particular gene or protein targeted by or provided by the exogenous agent.

[0456] In some embodiments, the provided methods or uses involve administration of a pharmaceutical composition comprising oral, inhaled, transdermal or parenteral (including intravenous, intratumoral, intraperitoneal, intramuscular, intracavity, and subcutaneous) administration. In some embodiments, the targeted lipid particle may be administered alone or formulated as a pharmaceutical composition. In some embodiments, the targeted lipid particle or compositions described herein can be administered to a subject, e.g., a mammal, e.g., a human. In some of any embodiments, the subject may be at risk of, may have a symptom of, or may be diagnosed with or identified as having, a particular disease or condition (e.g., a disease or condition described herein). In some embodiments, the disease is a disease or disorder.

[0457] In some embodiments, the targeted lipid particles may be administered in the form of a unit-dose composition, such as a unit dose oral, parenteral, transdermal or inhaled composition. In some embodiments, the compositions are prepared by admixture and are adapted for oral, inhaled, transdermal or parenteral administration, and as such may be in the form of tablets, capsules, oral liquid preparations, powders, granules, lozenges, reconstitutable powders, injectable and infusable solutions or suspensions or suppositories or aerosols.

[0458] In some embodiments, the regimen of administration may affect what constitutes an effective amount. In some embodiments, the therapeutic formulations may be administered to the subject either prior to or after a diagnosis of disease. In some embodiments, several divided dosages, as well as staggered dosages may be administered daily or sequentially, or the dose may be continuously infused, or may be a bolus injection. In some embodiments, the dosages of the therapeutic formulations may be proportionally increased or decreased as indicated by the exigencies of the therapeutic or prophylactic situation.

[0459] In some embodiments, the administration of the compositions of the present invention to a subject, preferably a mammal, more preferably a human, may be carried out using known procedures, at dosages and for periods of time effective to prevent or treat disease. In some embodiments, an effective amount of the therapeutic compound necessary to achieve a therapeutic effect may vary according to factors such as the activity of the particular compound employed; the time of administration; the rate of excretion of the compound; the duration of the treatment; other drugs, compounds or materials used in combination with the compound; the state of the disease or disorder, age, sex, weight, condition, general health and prior medical history of the subject being treated, and like factors well-known in the medical arts. In some embodiments, the dosage regimens may be adjusted to provide the optimum therapeutic response. In some embodiments, several divided doses may be administered daily or the dose may be proportionally reduced as indicated by the exigencies of the therapeutic situation. In some embodiments, the effective dose range for a therapeutic compound of the invention is from about 1 and 5,000 mg/kg of body weight/per day. One of ordinary skill in the art would be able to study the relevant factors and make the determination regarding the effective amount of the therapeutic compound without undue experimentation.

[0460] In some embodiments, the compound may be administered to a subject as frequently as several times daily, or it may be administered less frequently, such as once a day, once a week, once every two weeks, once a month, or even less frequently, such as once every several months or even once a year or less. In some embodiments, the amount of compound dosed per day may be administered, in non-limiting examples, every day, every other day, every 2 days, every 3 days, every 4 days, or every 5 days. In some embodiments, with every other day administration, a 5 mg per day dose may be initiated on Monday with a first subsequent 5 mg per day dose administered on Wednesday, a second subsequent 5 mg per day dose administered on Friday, and so on. The frequency of the dose will be readily apparent to the skilled artisan and will depend upon any number of factors, such as, but not limited to, the type and severity of the disease being treated, the type and age of the animal, etc.

[0461] In some embodiments, dosage levels of the active ingredients in the pharmaceutical compositions of this invention may be varied so as to obtain an amount of the active ingredient that is effective to achieve the desired therapeutic response for a particular subject, composition, and mode of administration, without being toxic to the subject.

[0462] A medical doctor, e.g., physician or veterinarian, having ordinary skill in the art may readily determine and prescribe the effective amount of the pharmaceutical composition required. In some embodiments, the physician or veterinarian could start doses of the compounds of the invention employed in the pharmaceutical composition at levels lower than that required in order to achieve the desired therapeutic effect and gradually increase the dosage until the desired effect is achieved.

[0463] In some embodiments, it is especially advantageous to formulate the compound in dosage unit form for ease of administration and uniformity of dosage. In some embodiments, dosage unit form as used herein refers to physically discrete units suited as unitary dosages for the subjects to be treated; each unit containing a predetermined quantity of therapeutic compound calculated to produce the desired therapeutic effect in association with the required pharmaceutical vehicle. In some embodiments, the dosage unit forms of the invention are dictated by and directly dependent on (a) the unique characteristics of the therapeutic compound and the particular therapeutic effect to be achieved, and (b) the limitations inherent in the art of compounding/formulating such a therapeutic compound for the treatment of a disease in a subject.

[0464] In some embodiments, the term “container” includes any receptacle for holding the pharmaceutical composition. In some embodiments, the container is the packaging that contains the pharmaceutical composition. In other embodiments, the container is not the packaging that contains the pharmaceutical composition, i.e., the container is a receptacle, such as a box or vial that contains the packaged pharmaceutical composition or unpackaged pharmaceutical composition and the instructions for use of the pharmaceutical composition. It should be understood that the instructions for use of the pharmaceutical composition may be contained on the packaging containing the pharmaceutical composition, and as such the instructions form an increased functional relationship to the packaged product. In some embodiments, instructions may contain information pertaining to the compound's ability to perform its intended function, e.g., treating or preventing a disease in a subject, or delivering an imaging or diagnostic agent to a subject.

[0465] In some embodiments, routes of administration of any of the compositions disclosed herein include oral, nasal, rectal, parenteral, sublingual, transdermal, transmucosal (e.g., sublingual, lingual, (trans)buccal, (trans)urethral, vaginal (e.g., trans- and perivaginally), (intra)nasal, and (trans)rectal), intravesical, intrapulmonary, intraduodenal, intragastrical, intrathecal, subcutaneous, intramuscular, intradermal, intra-arterial, intravenous, intrabronchial, inhalation, and topical administration.

[0466] In some of any embodiments, suitable compositions and dosage forms include, for example, tablets, capsules, caplets, pills, gel caps, troches, dispersions, suspensions, solutions, syrups, granules, beads, transdermal patches, gels, powders, pellets, magmas, lozenges, creams, pastes, plasters, lotions, discs, suppositories, liquid sprays for nasal or oral administration, dry powder or aerosolized formulations for inhalation, compositions and formulations for intravesical administration and the like.

[0467] In some embodiments, the targeted lipid particle composition comprising an exogenous agent or cargo, may be used to deliver such exogenous agent or cargo to a cell tissue or subject. In some embodiments, delivery of a cargo by administration of a targeted lipid particle composition described herein may modify cellular protein expression levels. In certain embodiments, the administered composition directs upregulation of (via expression in the cell, delivery in the cell, or induction within the cell) of one or more cargo (e.g., a polypeptide or mRNA) that provide a functional activity which is substantially absent or reduced in the cell in which the polypeptide is delivered. In some embodiments, the missing functional activity may be enzymatic, structural, or regulatory in nature. In some embodiments, the administered composition directs up-regulation of one or more polypeptides that increases (e.g., synergistically) a functional activity which is present but substantially deficient in the cell in which the polypeptide is upregulated. In some of any embodiments, the administered composition directs downregulation of (via expression in the cell, delivery in the cell, or induction within the cell) of one or more cargo (e.g., a polypeptide, siRNA, or miRNA) that repress a functional activity which is present or upregulated in the cell in which the polypeptide, siRNA, or miRNA is delivered. In some of any embodiments, the upregulated functional activity may be enzymatic, structural, or regulatory in nature. In some embodiments, the administered composition directs down-regulation of one or more polypeptides that decreases (e.g., synergistically) a functional activity which is present or upregulated in the cell in which the polypeptide is downregulated. In some embodiments, the administered composition directs upregulation of certain functional activities and downregulation of other functional activities.

[0468] In some of any embodiments, the targeted lipid particle composition (e.g., one comprising mitochondria or DNA) mediates an effect on a target cell, and the effect lasts for at least 1, 2, 3, 4, 5, 6, or 7 days, 2, 3, or 4 weeks, or 1, 2, 3, 6, or 12 months. In some embodiments (e.g., wherein the targeted lipid particle composition comprises an exogenous protein), the effect lasts for less than 1, 2, 3, 4, 5, 6, or 7 days, 2, 3, or 4 weeks, or 1, 2, 3, 6, or 12 months.

[0469] In some of any embodiments, the targeted lipid particle composition described herein is delivered ex-vivo to a cell or tissue, e.g., a human cell or tissue. In embodiments, the composition improves function of a cell or tissue ex-vivo, e.g., improves cell viability, respiration, or other function (e.g., another function described herein).

[0470] In some embodiments, the composition is delivered to an ex vivo tissue that is in an injured state (e.g., from trauma, disease, hypoxia, ischemia or other damage).

[0471] In some embodiments, the composition is delivered to an ex-vivo transplant (e.g., a tissue explant or tissue for transplantation, e.g., a human vein, a musculoskeletal graft such as bone or tendon, cornea, skin, heart valves, nerves; or an isolated or cultured organ, e.g., an organ to be transplanted into a human, e.g., a human heart, liver, lung, kidney, pancreas, intestine, thymus, eye). In some embodiments, the composition is delivered to the tissue or organ before, during and/or after transplantation.

[0472] In some embodiments, the composition is delivered, administered or contacted with a cell, e.g., a cell preparation. In some embodiments, the cell preparation may be a cell therapy preparation (a cell preparation intended for administration to a human subject). In embodiments, the cell preparation comprises cells expressing a chimeric antigen receptor (CAR), e.g., expressing a recombinant CAR. The cells expressing the CAR may be, e.g., T cells, Natural Killer (NK) cells, cytotoxic T lymphocytes (CTL), regulatory T cells. In embodiments, the cell preparation is a neural stem cell preparation. In embodiments, the cell preparation is a mesenchymal stem cell (MSC) preparation. In embodiments, the cell preparation is a hematopoietic stem cell (HSC) preparation. In embodiments, the cell preparation is an islet cell preparation.

[0473] In some embodiments, the targeted lipid particle compositions described herein can be administered to a subject, e.g., a mammal, e.g., a human. In such embodiments, the subject may be at risk of, may have a symptom of, or may be diagnosed with or identified as having, a particular disease or condition (e.g., a disease or condition described herein).

[0474] In some embodiments, the source of targeted lipid particles are from the same subject that is administered a targeted lipid particle composition. In other embodiments, they are different. In some embodiments, the source of targeted lipid particles and recipient tissue may be autologous (from the same subject) or heterologous (from different subjects). In some embodiments, the donor tissue for targeted lipid particle compositions described herein may be a different tissue type than the recipient tissue. In some embodiments, the donor tissue may be muscular tissue and the recipient tissue may be connective tissue (e.g., adipose tissue). In other embodiments, the donor tissue and recipient tissue may be of the same or different type, but from different organ systems.

[0475] In some embodiments, the targeted lipid particle composition described herein may be administered to a subject having a cancer, an autoimmune disease, an infectious disease, a metabolic disease, a neurodegenerative disease, or a genetic disease (e.g., enzyme deficiency). In some embodiments, the subject is in need of regeneration.

[0476] In some embodiments, the targeted lipid particle is co-administered with an inhibitor of a protein that inhibits membrane fusion. For example, Suppressyn is a human protein that inhibits cell-cell fusion (Sugimoto et al., “A novel human endogenous retroviral protein inhibits cell-cell fusion” Scientific Reports 3: 1462 (DOI: 10.1038/srep01462)). In some embodiments, the targeted lipid particle particles is co-administered with an inhibitor of sypressyn, e.g., a siRNA or inhibitory antibody.

### V. EXEMPLARY EMBODIMENTS

[0477] Among the provided embodiments are:

[0478] 1. A targeted lipid particle, comprising:

[0479] (a) a lipid bilayer enclosing a lumen,

[0480] (b) a henipavirus F protein molecule or biologically active portion thereof; and

[0481] (c) a targeted envelope protein comprising (i) a henipavirus envelope attachment glycoprotein G (G protein) or a biologically active portion thereof and (ii) single domain antibody (sdAb) variable domain, wherein the sdAb variable domain is attached to the C-terminus of the G protein or the biologically active portion thereof, wherein the F protein molecule or the biologically active portion thereof and the targeted envelope protein are embedded in the lipid bilayer.

[0482] 2. The targeted lipid particle of embodiment 1, wherein the single domain antibody is attached to the G protein via a linker.

[0483] 3. The targeted lipid particle of embodiment 2, wherein the linker is a peptide linker.

[0484] 4. A targeted lipid particle, comprising:

[0485] (a) a lipid bilayer enclosing a lumen,

[0486] (b) a henipavirus F protein molecule or biologically active portion thereof; and

[0487] (c) a targeted envelope protein comprising a henipavirus envelope attachment glycoprotein G (G protein) or biologically active portion thereof attached to a single domain antibody (sdAb) variable domain via a peptide linker, wherein the single domain antibody binds to a cell surface molecule of a target cell,

[0488] wherein the F protein molecule or biologically active portion thereof and the targeted envelope protein are embedded in the lipid bilayer.

[0489] 5. The targeted lipid particle of any of embodiments 1-4, wherein N-terminus of the F protein molecule or biologically active portion thereof is exposed on the outside of lipid bilayer.

[0490] 6. The targeted lipid particle of any of embodiments 1-5, wherein the C-terminus of the G protein is exposed on the outside of the lipid bilayer.

[0491] 7. The targeted lipid particle of any of embodiments 1-6, wherein the single domain antibody binds a cell surface molecule present on a target cell.

[0492] 8. The targeted lipid particle of embodiment 7, wherein the cell surface molecule is a protein, glycan, lipid or low molecular weight molecule.

[0493] 9. The targeted lipid particle of embodiment 7, wherein the target cell is selected from the group consisting of tumor-infiltrating lymphocytes, T cells, neoplastic or tumor cells, virus-infected cells, stem cells, central nervous system (CNS) cells, hematopoeietic stem cells (HSCs), liver cells or fully differentiated cells.

[0494] 10. The targeted lipid particle of embodiment 9, wherein the target cell is selected from the group consisting of a CD3+ T cell, a CD4+ Tcell, a CD8+ T cell, a hepatocyte, a haematepoietic stem cell, a CD34+ haematepoietic stem cell, a CD105+ haematepoietic stem cell, a CD117+ haematepoietic stem cell, a CD105+ endothelial cell, a B cell, a CD20+ B cell, a CD19+ B cell, a cancer cell, a CD133+ cancer cell, an EpCAM+ cancer cell, a CD19+ cancer cell, a Her2/Neu+ cancer cell, a GluA2+ neuron, a GluA4+ neuron, a NKG2D+ natural killer cell, a SLC1A3+ astrocyte, a SLC7A10+ adipocyte, or a CD30+ lung epithelial cell.

[0495] 11. The targeted lipid particle of any of the preceding embodiments, wherein the single domain antibody binds an antigen or portion thereof present on a target cell.

[0496] 12. The targeted lipid particle of any of embodiments 3-11, wherein the peptide linker comprises up to 65 amino acids in length.

[0497] 13. The targeted lipid particle of any of embodiments 3-11, wherein the peptide linker comprises from or from about 2 to 65 amino acids, 2 to 60 amino acids, 2 to 56 amino acids, 2 to 52 amino acids, 2 to 48 amino acids, 2 to 44 amino acids, 2 to 40 amino acids, 2 to 36 amino acids, 2 to 32 amino acids, 2 to 28 amino acids, 2 to 24 amino acids, 2 to 20 amino acids, 2 to 18 amino acids, 2 to 14 amino acids, 2 to 12 amino acids, 2 to 10 amino acids, 2 to 8 amino acids, 2 to 6 amino acids, 6 to 65 amino acids, 6 to 60 amino acids, 6 to 56 amino acids, 6 to 52 amino acids, 6 to 48 amino acids, 6 to 44 amino acids, 6 to 40 amino acids, 6 to 36 amino acids, 6 to 32 amino acids, 6 to 28 amino acids, 6 to 24 amino acids, 6 to 20 amino acids, 6 to 18 amino acids, 6 to 14 amino acids, 6 to 12 amino acids, 6 to 10 amino acids, 6 to 8 amino acids, 8 to 65 amino acids, 8 to 60 amino acids, 8 to 56 amino acids, 8 to 52 amino acids, 8 to 48 amino acids, 8 to 44 amino acids, 8 to 40 amino acids, 8 to 36 amino acids, 8 to 32 amino acids, 8 to 28 amino acids, 8 to 24 amino acids, 8 to 20 amino acids, 8 to 18 amino acids, 8 to 14 amino acids, 8 to 12 amino acids, 8 to 10 amino acids, 10 to 65 amino acids, 10 to 60 amino acids, 10 to 56 amino acids, 10 to 52 amino acids, 10 to 48 amino acids, 10 to 44 amino acids, 10 to 40 amino acids, 10 to 36 amino acids, 10 to 32 amino acids, 10 to 28 amino acids, 10 to 24 amino acids, 10 to 20 amino acids, 10 to 18 amino acids, 10 to 14 amino acids, 10 to 12 amino acids, 12 to 65 amino acids, 12 to 60 amino acids, 12 to 56 amino acids, 12 to 52 amino acids, 12 to 48 amino acids, 12 to 44 amino acids, 12 to 40 amino acids, 12 to 36 amino acids, 12 to 32 amino acids, 12 to 28 amino acids, 12 to 24 amino acids, 12 to 20 amino acids, 12 to 18 amino acids, 12 to 14 amino acids, 14 to 65 amino acids, 14 to 60 amino acids, 14 to 56 amino acids, 14 to 52 amino acids, 14 to 48 amino acids, 14 to 44 amino acids, 14 to 40 amino acids, 14 to 36 amino acids, 14 to 32 amino acids, 14 to 28 amino acids, 14 to 24 amino acids, 14 to 20 amino acids, 14 to 18 amino acids, 18 to 65 amino acids, 18 to 60 amino acids, 18 to 56 amino acids, 18 to 52 amino acids, 18 to 48 amino acids, 18 to 44 amino acids, 18 to 40 amino acids, 18 to 36 amino acids, 18 to 32 amino acids, 18 to 28 amino acids, 18 to 24 amino acids, 18 to 20 amino acids, 20 to 65 amino acids, 20 to 60 amino acids, 20 to 56 amino acids, 20 to 52 amino acids, 20 to 48 amino acids, 20 to 44 amino acids, 20 to 40 amino acids, 20 to 36 amino acids, 20 to 32 amino acids, 20 to 28 amino acids, 20 to 26 amino acids, 20 to 24 amino acids, 24 to 65 amino acids, 24 to 60 amino acids, 24 to 56 amino acids, 24 to 52 amino acids, 24 to 48 amino acids, 24 to 44 amino acids, 24 to 40 amino acids, 24 to 36 amino acids, 24 to 32 amino acids, 24 to 30 amino acids, 24 to 28 amino acids, 28 to 65 amino acids, 28 to 60 amino acids, 28 to 56 amino acids, 28 to 52 amino acids, 28 to 48 amino acids, 28 to 44 amino acids, 28 to 40 amino acids, 28 to 36 amino acids, 28 to 34 amino acids, 28 to 32 amino acids, 32 to 65 amino acids, 32 to 60 amino acids, 32 to 56 amino acids, 32 to 52 amino acids, 32 to 48 amino acids, 32 to 44 amino acids, 32 to 40 amino acids, 32 to 38 amino acids, 32 to 36 amino acids, 36 to 65 amino acids, 36 to 60 amino acids, 36 to 56 amino acids, 36 to 52 amino acids, 36 to 48 amino acids, 36 to 44 amino acids, 36 to 40 amino acids, 40 to 65 amino acids, 40 to 60 amino acids, 40 to 56 amino acids, 40 to 52 amino acids, 40 to 48 amino acids, 40 to 44 amino acids, 44 to 65 amino acids, 44 to 60 amino acids, 44 to 56 amino acids, 44 to 52 amino acids, 44 to 48 amino acids, 48 to 65 amino acids, 48 to 60 amino acids, 48 to 56 amino acids, 48 to 52 amino acids, 50 to 65 amino acids, 50 to 60 amino acids, 50 to 56 amino acids, 50 to 52 amino acids, 54 to 65 amino acids, 54 to 60 amino acids, 54 to 56 amino acids, 58 to 65 amino acids, 58 to 60 amino acids, or 60 to 65 amino acids.

[0498] 14. The targeted lipid particle of any of embodiments 3-1 1, wherein peptide linker comprises a polypeptide that is 3, 4, 5, 6, 7, 8, 9, 10, 11, 12, 13, 14, 15, 16, 17, 18, 19, 20, 21, 22, 23, 24, 25, 26, 27, 28, 29, 30, 31, 32, 33, 34, 35, 36, 37, 38, 39, 40, 41, 42, 43, 44, 45, 46, 47, 48, 49, 50, 51, 52, 53, 54, 55, 56, 57, 58, 59, 60, 61, 62, 63, 64 or 65 amino acids in length.

[0499] 15. The targeted lipid particle of any of embodiments 3-14, wherein the peptide linker is a flexible linker that comprises GS, GGS, GGGGS (SEQ ID NO:43), GGGGGS (SEQ ID NO:41) or combinations thereof.

[0500] 16. The targeted lipid particle of any of embodiments 3-15, wherein the peptide linker comprises (GGS)n, wherein n is 1 to 10.

[0501] 17. The targeted lipid particle of any of embodiments 3-15, wherein the peptide linker comprises (GGGGS)n (SEQ ID NO:42), wherein n is 1 to 10.

[0502] 18. The targeted lipid particle of any of embodiments 3-15, wherein the peptide linker comprises (GGGGGS)n (SEQ ID NO:27), wherein n is 1 to 6.

[0503] 19. The targeted lipid particle of any of embodiments 1-18, wherein the G protein or the biologically active portion thereof is a wild-type Nipah virus G (NiV-G) protein or a Hendra virus G protein.

[0504] 20. The targeted lipid particle of any of embodiments 1-19, wherein the G protein or the biologically active portion thereof is a wild-type NiV-G protein or a functionally active variant or biologically active portion thereof.

[0505] 21. The targeted lipid particle of embodiment 20, wherein the mutant NiV-G protein or functionally active variant or biologically active portion thereof comprises an amino acid sequence having at least at or about 80%, at least at or about 81%, at least at or about 82%, at least at or about 83%, at least at or about 84%, at least at or about 85%, at least at or about 86%, at least at or about 87%, at least at or about 88%, at least at or about 89%, at least at or about 90%, at least at or about 91%, at least at or about 92%, at least at or about 93%, at least at or about 94%, at least at or about 95%, at or about 96%, at least at or about 97%, at least at or about 98%, or at least at or about 99% sequence identity to SEQ ID NO:9, SEQ ID NO:28 or SEQ ID NO:44.

[0506] 22. The targeted lipid particle of embodiment 21, wherein the NiV-G protein is a biologically active portion that is truncated and lacks up to 40 contiguous amino acid residues at or near the N-terminus of the wild-type NiV-G protein (SEQ ID NO:9, SEQ ID NO:28 or SEQ ID NO:44).

[0507] 23. The targeted lipid particle of any of embodiments 1-18, wherein the NiV-G protein is a biologically active portion that is truncated at the N-terminus of wild-type NiV-G and has the sequence set forth in any of SEQ ID NOS: 10-15, 35-40 or 45-50 or an amino acid sequence having at least at or about 80%, at least at or about 81%, at least at or about 82%, at least at or about 83%, at least at or about 84%, at least at or about 85%, at least at or about 86%, at least at or about 87%, at least at or about 88%, at least at or about 89%, at least at or about 90%, at least at or about 91%, at least at or about 92%, at least at or about 93%, at least at or about 94%, at least at or about 95%, at or about 96%, at least at or about 97%, at least at or about 98%, or at least at or about 99% sequence identity to SEQ ID NOs: 10-15, 35-40 or 45-50.

[0508] 24. The targeted lipid particle of any of embodiments 21-23, wherein the NiV-G protein has a 5 amino acid truncation at or near the N-terminus of the wild-type NiV-G protein (SEQ ID NO:9, SEQ ID NO:28 or SEQ ID NO:44).

[0509] 25. The targeted lipid particle of embodiment 24, wherein the NiV-G protein has the amino acid sequence set forth in SEQ ID NO: 10 or an amino acid sequence having at least at or about 80%, at least at or about 81%, at least at or about 82%, at least at or about 83%, at or about 84%, at least at or about 85%, at least at or about 86%, or at least at or about 87%, at least at or about 88%, or at least at or about 89%, at least at or about 90%, at least at or about 91%, at least at or about 92%, at least at or about 93%, at least at or about 94%, at least at or about 95%, at or about 96%, at least at or about 97%, at least at or about 98%, or at least at or about 99% sequence identity to SEQ ID NO:10.

[0510] 26. The targeted lipid particle of embodiment 24, wherein the NiV-G protein has the amino acid sequence set forth in SEQ ID NO: 35 or an amino acid sequence having at least at or about 80%, at least at or about 81%, at least at or about 82%, at least at or about 83%, at or about 84%, at least at or about 85%, at least at or about 86%, or at least at or about 87%, at least at or about 88%, or at least at or about 89%, at least at or about 90%, at least at or about 91%, at least at or about 92%, at least at or about 93%, at least at or about 94%, at least at or about 95%, at or about 96%, at least at or about 97%, at least at or about 98%, or at least at or about 99% sequence identity to SEQ ID NO:35.

[0511] 27. The targeted lipid particle of embodiment 24, wherein the NiV-G protein has the amino acid sequence set forth in SEQ ID NO: 45 or an amino acid sequence having at least at or about 80%, at least at or about 81%, at least at or about 82%, at least at or about 83%, at or about 84%, at least at or about 85%, at least at or about 86%, or at least at or about 87%, at least at or about 88%, or at least at or about 89%, at least at or about 90%, at least at or about 91%, at least at or about 92%, at least at or about 93%, at least at or about 94%, at least at or about 95%, at or about 96%, at least at or about 97%, at least at or about 98%, or at least at or about 99% sequence identity to SEQ ID NO:45.

[0512] 28. The targeted lipid particle of any of embodiments 21-23, wherein the NiV-G protein has a 10 amino acid truncation at or near the N-terminus of the wild-type NiV-G protein (SEQ ID NO:9, SEQ ID NO:28 or SEQ ID NO:44).

[0513] 29. The targeted lipid particle of embodiment 28, wherein the NiV-G protein has the amino acid sequence set forth in SEQ ID NO: 11 or an amino acid sequence having at least at or about 80%, at least at or about 81%, at least at or about 82%, at least at or about 83%, at or about 84%, at least at or about 85%, at least at or about 86%, or at least at or about 87%, at least at or about 88%, or at least at or about 89%, at least at or about 90%, at least at or about 91%, at least at or about 92%, at least at or about 93%, at least at or about 94%, at least at or about 95%, at or about 96%, at least at or about 97%, at least at or about 98%, or at least at or about 99% sequence identity to SEQ ID NO:11.

[0514] 30. The targeted lipid particle of embodiment 28, wherein the NiV-G protein has the amino acid sequence set forth in SEQ ID NO: 36 or an amino acid sequence having at least at or about 80%, at least at or about 81%, at least at or about 82%, at least at or about 83%, at or about 84%, at least at or about 85%, at least at or about 86%, or at least at or about 87%, at least at or about 88%, or at least at or about 89%, at least at or about 90%, at least at or about 91%, at least at or about 92%, at least at or about 93%, at least at or about 94%, at least at or about 95%, at or about 96%, at least at or about 97%, at least at or about 98%, or at least at or about 99% sequence identity to SEQ ID NO:36.

[0515] 31. The targeted lipid particle of embodiment 28, wherein the NiV-G protein has the amino acid sequence set forth in SEQ ID NO: 46 or an amino acid sequence having at least at or about 80%, at least at or about 81%, at least at or about 82%, at least at or about 83%, at or about 84%, at least at or about 85%, at least at or about 86%, or at least at or about 87%, at least at or about 88%, or at least at or about 89%, at least at or about 90%, at least at or about 91%, at least at or about 92%, at least at or about 93%, at least at or about 94%, at least at or about 95%, at or about 96%, at least at or about 97%, at least at or about 98%, or at least at or about 99% sequence identity to SEQ ID NO:46.

[0516] 32. The targeted lipid particle of any of embodiments 21-23, wherein the NiV-G protein has a 15 amino acid truncation at or near the N-terminus of the wild-type NiV-G protein (SEQ ID NO:9, SEQ ID NO:28 or SEQ ID NO:44).

[0517] 33. The targeted lipid particle of embodiment 32, wherein the NiV-G protein has the amino acid sequence set forth in SEQ ID NO: 12 or an amino acid sequence having at least at or about 80%, at least at or about 81%, at least at or about 82%, at least at or about 83%, at or about 84%, at least at or about 85%, at least at or about 86%, or at least at or about 87%, at least at or about 88%, or at least at or about 89%, at least at or about 90%, at least at or about 91%, at least at or about 92%, at least at or about 93%, at least at or about 94%, at least at or about 95%, at or about 96%, at least at or about 97%, at least at or about 98%, or at least at or about 99% sequence identity to SEQ ID NO:12.

[0518] 34. The targeted lipid particle of embodiment 32, wherein the NiV-G protein has the amino acid sequence set forth in SEQ ID NO: 37 or an amino acid sequence having at least at or about 80%, at least at or about 81%, at least at or about 82%, at least at or about 83%, at or about 84%, at least at or about 85%, at least at or about 86%, or at least at or about 87%, at least at or about 88%, or at least at or about 89%, at least at or about 90%, at least at or about 91%, at least at or about 92%, at least at or about 93%, at least at or about 94%, at least at or about 95%, at or about 96%, at least at or about 97%, at least at or about 98%, or at least at or about 99% sequence identity to SEQ ID NO:37.

[0519] 35. The targeted lipid particle of embodiment 32, wherein the NiV-G protein has the amino acid sequence set forth in SEQ ID NO: 47 or an amino acid sequence having at least at or about 80%, at least at or about 81%, at least at or about 82%, at least at or about 83%, at or about 84%, at least at or about 85%, at least at or about 86%, or at least at or about 87%, at least at or about 88%, or at least at or about 89%, at least at or about 90%, at least at or about 91%, at least at or about 92%, at least at or about 93%, at least at or about 94%, at least at or about 95%, at or about 96%, at least at or about 97%, at least at or about 98%, or at least at or about 99% sequence identity to SEQ ID NO:47.

[0520] 36. The targeted lipid particle of any of embodiments 21-23, wherein the NiV-G protein has a 20 amino acid truncation at or near the N-terminus of the wild-type NiV-G protein (SEQ ID NO:9, SEQ ID NO:28 or SEQ ID NO:44).

[0521] 37. The targeted lipid particle of embodiment 36, wherein the NiV-G protein has the amino acid sequence set forth in SEQ ID NO: 13 or an amino acid sequence having at least at or about 80%, at least at or about 81%, at least at or about 82%, at least at or about 83%, at or about 84%, at least at or about 85%, at least at or about 86%, or at least at or about 87%, at least at or about 88%, or at least at or about 89%, at least at or about 90%, at least at or about 91%, at least at or about 92%, at least at or about 93%, at least at or about 94%, at least at or about 95%, at or about 96%, at least at or about 97%, at least at or about 98%, or at least at or about 99% sequence identity to SEQ ID NO:13.

[0522] 38. The targeted lipid particle of embodiment 36, wherein the NiV-G protein has the amino acid sequence set forth in SEQ ID NO: 38 or an amino acid sequence having at least at or about 80%, at least at or about 81%, at least at or about 82%, at least at or about 83%, at or about 84%, at least at or about 85%, at least at or about 86%, or at least at or about 87%, at least at or about 88%, or at least at or about 89%, at least at or about 90%, at least at or about 91%, at least at or about 92%, at least at or about 93%, at least at or about 94%, at least at or about 95%, at or about 96%, at least at or about 97%, at least at or about 98%, or at least at or about 99% sequence identity to SEQ ID NO:38.

[0523] 39. The targeted lipid particle of embodiment 36, wherein the NiV-G protein has the amino acid sequence set forth in SEQ ID NO: 48 or an amino acid sequence having at least at or about 80%, at least at or about 81%, at least at or about 82%, at least at or about 83%, at or about 84%, at least at or about 85%, at least at or about 86%, or at least at or about 87%, at least at or about 88%, or at least at or about 89%, at least at or about 90%, at least at or about 91%, at least at or about 92%, at least at or about 93%, at least at or about 94%, at least at or about 95%, at or about 96%, at least at or about 97%, at least at or about 98%, or at least at or about 99% sequence identity to SEQ ID NO:48.

[0524] 40. The targeted lipid particle of any of embodiments 21-23, wherein the NiV-G protein has a 25 amino acid truncation at or near the N-terminus of the wild-type NiV-G protein (SEQ ID NO:9, SEQ ID NO:28 or SEQ ID NO:44).

[0525] 41. The targeted lipid particle of embodiment 40, wherein the NiV-G protein has the amino acid sequence set forth in SEQ ID NO: 14 or an amino acid sequence having at least at or about 80%, at least at or about 81%, at least at or about 82%, at least at or about 83%, at or about 84%, at least at or about 85%, at least at or about 86%, or at least at or about 87%, at least at or about 88%, or at least at or about 89%, at least at or about 90%, at least at or about 91%, at least at or about 92%, at least at or about 93%, at least at or about 94%, at least at or about 95%, at or about 96%, at least at or about 97%, at least at or about 98%, or at least at or about 99% sequence identity to SEQ ID NO:14.

[0526] 42. The targeted lipid particle of embodiment 40, wherein the NiV-G protein has the amino acid sequence set forth in SEQ ID NO: 39 or an amino acid sequence having at least at or about 80%, at least at or about 81%, at least at or about 82%, at least at or about 83%, at or about 84%, at least at or about 85%, at least at or about 86%, or at least at or about 87%, at least at or about 88%, or at least at or about 89%, at least at or about 90%, at least at or about 91%, at least at or about 92%, at least at or about 93%, at least at or about 94%, at least at or about 95%, at or about 96%, at least at or about 97%, at least at or about 98%, or at least at or about 99% sequence identity to SEQ ID NO:39.

[0527] 43. The targeted lipid particle of embodiment 40, wherein the NiV-G protein has the amino acid sequence set forth in SEQ ID NO: 49 or an amino acid sequence having at least at or about 80%, at least at or about 81%, at least at or about 82%, at least at or about 83%, at or about 84%, at least at or about 85%, at least at or about 86%, or at least at or about 87%, at least at or about 88%, or at least at or about 89%, at least at or about 90%, at least at or about 91%, at least at or about 92%, at least at or about 93%, at least at or about 94%, at least at or about 95%, at or about 96%, at least at or about 97%, at least at or about 98%, or at least at or about 99% sequence identity to SEQ ID NO:49.

[0528] 44. The targeted lipid particle of any of embodiments 21-23, wherein the NiV-G protein has a 30 amino acid truncation at or near the N-terminus of the wild-type NiV-G protein (SEQ ID NO:9, SEQ ID NO:28 or SEQ ID NO:44).

[0529] 45. The targeted lipid particle of embodiment 44, wherein the NiV-G protein has the amino acid sequence set forth in SEQ ID NO: 15 or an amino acid sequence having at least at or about 80%, at least at or about 81%, at least at or about 82%, at least at or about 83%, at or about 84%, at least at or about 85%, at least at or about 86%, or at least at or about 87%, at least at or about 88%, or at least at or about 89%, at least at or about 90%, at least at or about 91%, at least at or about 92%, at least at or about 93%, at least at or about 94%, at least at or about 95%, at or about 96%, at least at or about 97%, at least at or about 98%, or at least at or about 99% sequence identity to SEQ ID NO:15.

[0530] 46. The targeted lipid particle of embodiment 44, wherein the NiV-G protein has the amino acid sequence set forth in SEQ ID NO: 40 or an amino acid sequence having at least at or about 80%, at least at or about 81%, at least at or about 82%, at least at or about 83%, at or about 84%, at least at or about 85%, at least at or about 86%, or at least at or about 87%, at least at or about 88%, or at least at or about 89%, at least at or about 90%, at least at or about 91%, at least at or about 92%, at least at or about 93%, at least at or about 94%, at least at or about 95%, at or about 96%, at least at or about 97%, at least at or about 98%, or at least at or about 99% sequence identity to SEQ ID NO:40.

[0531] 47. The targeted lipid particle of embodiment 44, wherein the NiV-G protein has the amino acid sequence set forth in SEQ ID NO: 50 or an amino acid sequence having at least at or about 80%, at least at or about 81%, at least at or about 82%, at least at or about 83%, at or about 84%, at least at or about 85%, at least at or about 86%, or at least at or about 87%, at least at or about 88%, or at least at or about 89%, at least at or about 90%, at least at or about 91%, at least at or about 92%, at least at or about 93%, at least at or about 94%, at least at or about 95%, at or about 96%, at least at or about 97%, at least at or about 98%, or at least at or about 99% sequence identity to SEQ ID NO:50.

[0532] 48. The targeted lipid particle of any of embodiments 21-23, wherein the NiV-G protein has a 34 amino acid truncation at or near the N-terminus of the wild-type NiV-G protein (SEQ ID NO:9, SEQ ID NO:28 or SEQ ID NO:44).

[0533] 49. The targeted lipid particle of embodiment 48, wherein the NiV-G protein has the amino acid sequence set forth in SEQ ID NO: 22 or an amino acid sequence having at or about 80%, at least at or about 81%, at least at or about 82%, at least at or about 83%, at or about 84%, at least at or about 85%, at least at or about 86%, or at least at or about 87%, at least at or about 88%, or at least at or about 89%, at least at or about 90%, at least at or about 91%, at least at or about 92%, at least at or about 93%, at least at or about 94%, at least at or about 95%, at or about 96%, at least at or about 97%, at least at or about 98%, or at least at or about 99% sequence identity to SEQ ID NO:22.

[0534] 50. The targeted lipid particle of embodiment 48, wherein the NiV-G protein has the amino acid sequence set forth in SEQ ID NO: 53 or an amino acid sequence having at or about 80%, at least at or about 81%, at least at or about 82%, at least at or about 83%, at or about 84%, at least at or about 85%, at least at or about 86%, or at least at or about 87%, at least at or about 88%, or at least at or about 89%, at least at or about 90%, at least at or about 91%, at least at or about 92%, at least at or about 93%, at least at or about 94%, at least at or about 95%, at or about 96%, at least at or about 97%, at least at or about 98%, or at least at or about 99% sequence identity to SEQ ID NO:53.

[0535] 51. The targeted lipid particle any of embodiments 1-48, wherein the G-protein or the biologically active portion thereof is a mutant NiV-G protein that exhibits reduced binding to Ephrin B2 or Ephrin B3.

[0536] 52. The targeted lipid particle of embodiment 51, wherein the mutant NiV-G protein comprises:

[0537] one or more amino acid substitutions corresponding to amino acid substitutions selected from the group consisting of E501A, W504A, Q530A and E533A with reference to numbering set forth in SEQ ID NO:28.

[0538] 53. The targeted lipid particle of embodiment 51 or embodiment 52, wherein the mutant NiV-G protein has the amino acid sequence set forth in SEQ ID NO: 16 or an amino acid sequence having at or about 80%, at least at or about 81%, at least at or about 82%, at least at or about 83%, at or about 84%, at least at or about 85%, at least at or about 86%, or at least at or about 87%, at least at or about 88%, or at least at or about 89%, at least at or about 90%, at least at or about 91%, at least at or about 92%, at least at or about 93%, at least at or about 94%, at least at or about 95%, at or about 96%, at least at or about 97%, at least at or about 98%, or at least at or about 99% sequence identity to SEQ ID NO:16.

[0539] 54. The targeted lipid particle of embodiment 51 or embodiment 52, wherein the mutant NiV-G protein has the amino acid sequence set forth in SEQ ID NO: 51 or an amino acid sequence having at or about 80%, at least at or about 81%, at least at or about 82%, at least at or about 83%, at or about 84%, at least at or about 85%, at least at or about 86%, or at least at or about 87%, at least at or about 88%, or at least at or about 89%, at least at or about 90%, at least at or about 91%, at least at or about 92%, at least at or about 93%, at least at or about 94%, at least at or about 95%, at or about 96%, at least at or about 97%, at least at or about 98%, or at least at or about 99% sequence identity to SEQ ID NO:51.

[0540] 55. The targeted lipid particle of any of embodiments 1-54, wherein the F protein or the biologically active portion thereof is a wild-type Nipah virus F (NiV-F) protein or a Hendra virus F protein or is a functionally active variant or biologically active portion thereof.

[0541] 56. The targeted lipid particle of any of embodiments 1-55, wherein the F protein or the biologically active portion thereof is a wild-type NiV-F protein or a functionally active variant or a biologically active portion thereof.

[0542] 57. The targeted lipid particle of any of embodiments 1-56, wherein the NiV-F-protein or the functionally active variant or biologically active portion thereof comprises the amino acid sequence set forth in SEQ ID NO: 2, or an amino acid sequence having at or about 80%, at least at or about 81%, at least at or about 82%, at least at or about 83%, at or about 84%, at least at or about 85%, at least at or about 86%, or at least at or about 87%, at least at or about 88%, or at least at or about 89%, at least at or about 90%, at least at or about 91%, at least at or about 92%, at least at or about 93%, at least at or about 94%, at least at or about 95%, at or about 96%, at least at or about 97%, at least at or about 98%, or at least at or about 99% sequence identity to SEQ ID NO: 2.

[0543] 58. The targeted lipid particle of any of embodiments 1-57, wherein the NiV-F protein is a is a biologically active portion thereof that has a 20 amino acid truncation at or near the C-terminus of the wild-type NiV-F protein (SEQ ID NO:2).

[0544] 59. The targeted lipid particle of embodiment 58, wherein the NiV-F protein has an amino acid sequence having at or about 80%, at least at or about 81%, at least at or about 82%, at least at or about 83%, at or about 84%, at least at or about 85%, at least at or about 86%, or at least at or about 87%, at least at or about 88%, or at least at or about 89%, at least at or about 90%, at least at or about 91%, at least at or about 92%, at least at or about 93%, at least at or about 94%, at least at or about 95%, at or about 96%, at least at or about 97%, at least at or about 98%, or at least at or about 99% sequence identity to SEQ ID NO: 5.

[0545] 60. The targeted lipid particle of any of embodiments 1-57, wherein the NiV-F protein is a biologically active portion thereof that comprises:

[0546] i) a 20 amino acid truncation at or near the C-terminus of the wild-type NiV-F protein (SEQ ID NO:2); and

[0547] ii) a point mutation on an N-linked glycosylation site.

[0548] 61. The targeted lipid particle of embodiment 60, wherein the NiV-F protein has an amino acid sequence having at or about 80%, at least at or about 81%, at least at or about 82%, at least at or about 83%, at or about 84%, at least at or about 85%, at least at or about 86%, or at least at or about 87%, at least at or about 88%, or at least at or about 89%, at least at or about 90%, at least at or about 91%, at least at or about 92%, at least at or about 93%, at least at or about 94%, at least at or about 95%, at or about 96%, at least at or about 97%, at least at or about 98%, or at least at or about 99% sequence identity to SEQ ID NO: 7.

[0549] 62. The targeted lipid particle of any of embodiments 1-57, wherein the NiV-F protein is a biologically active portion thereof that has a 22 amino acid truncation at or near the C-terminus of the wild-type NiV-F protein (SEQ ID NO:2).

[0550] 63. The targeted lipid particle of embodiment 62, wherein the NiV-F protein has an amino acid sequence that is encoded by a sequence of nucleotides encoding a sequence having at or about 80%, at least at or about 81%, at least at or about 82%, at least at or about 83%, at or about 84%, at least at or about 85%, at least at or about 86%, or at least at or about 87%, at least at or about 88%, or at least at or about 89%, at least at or about 90%, at least at or about 91%, at least at or about 92%, at least at or about 93%, at least at or about 94%, at least at or about 95%, at or about 96%, at least at or about 97%, at least at or about 98%, or at least at or about 99% sequence identity to SEQ ID NO: 8.

[0551] 64. The targeted lipid particle of embodiment 63, wherein the NiV-F protein has an amino acid sequence having at or about 80%, at least at or about 81%, at least at or about 82%, at least at or about 83%, at or about 84%, at least at or about 85%, at least at or about 86%, or at least at or about 87%, at least at or about 88%, or at least at or about 89%, at least at or about 90%, at least at or about 91%, at least at or about 92%, at least at or about 93%, at least at or about 94%, at least at or about 95%, at or about 96%, at least at or about 97%, at least at or about 98%, or at least at or about 99% sequence identity to SEQ ID NO: 23.

[0552] 65. The targeted lipid particle of any of embodiments 1-57, wherein the F-protein or the biologically active portion thereof comprises an F1 subunit or a fusogenic portion thereof.

[0553] 66. The targeted lipid particle of embodiment 65, wherein the F1 subunit is a proteolytically cleaved portion of the F0 precursor.

[0554] 67. The targeted lipid particle of embodiment 66, wherein the F1 subunit comprises the sequence set forth in SEQ ID NO: 4, or an amino acid sequence having at or about 80%, at least at or about 81%, at least at or about 82%, at least at or about 83%, at or about 84%, at least at or about 85%, at least at or about 86%, or at least at or about 87%, at least at or about 88%, or at least at or about 89%, at least at or about 90%, at least at or about 91%, at least at or about 92%, at least at or about 93%, at least at or about 94%, at least at or about 95%, at or about 96%, at least at or about 97%, at least at or about 98%, or at least at or about 99% sequence identity to SEQ ID NO: 4.

[0555] 68. The targeted lipid particle of any of embodiments 1-67, wherein the lipid bilayer is derived from a membrane of a host cell used for producing a retrovirus or retrovirus-like particle.

[0556] 69. The targeted lipid particle of any of embodiments 1-60, wherein the lipid bilayer is or comprises a viral envelope.

[0557] 70. The targeted lipid particle of embodiment 68, wherein the retrovirus-like particle is replication defective.

[0558] 71. The targeted lipid particle of any of embodiments 1-70, wherein the targeted lipid particle comprises one or more viral components other than the F protein molecule and the G protein.

[0559] 72. The targeted lipid particle of embodiment 71, wherein the one or more viral components are from a retrovirus.

[0560] 73. The targeted lipid particle of embodiment 72, wherein the retrovirus is a lentivirus.

[0561] 74. The targeted lipid particle of any of embodiments 71-73, wherein the one or more viral components comprise a viral packaging protein selected from one or more of Gag, Pol, Rev and Tat.

[0562] 75. The targeted lipid particle of any of embodiments 71-74, wherein the one or more viral components comprises one or more of (e.g., all of) the following nucleic acid sequences: 5′ LTR (e.g., comprising U5 and lacking a functional U3 domain), Psi packaging element (Psi), Central polypurine tract (cPPT)/central termination sequence (CTS) (e.g. DNA flap), Poly A tail sequence, a posttranscriptional regulatory element (e.g. WPRE), a Rev response element (RRE), and 3′ LTR (e.g., comprising U5 and lacking a functional U3).

[0563] 76. The targeted lipid particle of any of embodiments 1-75, wherein the lipid particle further comprises an exogenous agent.

[0564] 77. The targeted lipid particle of embodiment 76, wherein the exogenous agent is present in the lumen.

[0565] 78. The targeted lipid particle of embodiment 77, wherein the exogenous agent is a protein or a nucleic acid, optionally wherein the nucleic acid is a DNA or RNA.

[0566] 79. The targeted lipid particle of any of embodiments 76-78, wherein the exogenous agent encodes a therapeutic agent or a diagnostic agent.

[0567] 80. The targeted lipid particle of any of embodiments 68-79, wherein the host cell is selected from the group consisting of CHO cells, BHK cells, MDCK cells, C3H 10T1/2 cells, FLY cells, Psi-2 cells, BOSC 23 cells, PA317 cells, WEHI cells, COS cells, BSC 1 cells, BSC 40 cells, BMT 10 cells, VERO cells, W138 cells, MRCS cells, A549 cells, HT1080 cells, 293 cells, 293T cells, B-50 cells, 3T3 cells, NIH3T3 cells, HepG2 cells, Saos-2 cells, Huh7 cells, HeLa cells, W163 cells, 211 cells, and 211A cells.

[0568] 81. The targeted lipid particle of any of embodiments 68-80, wherein the host cell comprises 293T cells.

[0569] 82. A polynucleotide comprising a nucleic acid sequence encoding (i) a henipavirus envelope attachment glycoprotein G (G protein) or a biologically active portion thereof and (ii) a single domain antibody (sdAb) variable domain, wherein the sdAb variable domain is attached to the C-terminus of the G protein or the biologically active portion thereof.

[0570] 83. The polynucleotide of embodiment 82, further comprising (iii) a nucleic acid sequence encoding a henipavirus F protein molecule or a biologically active portion thereof.

[0571] 84. The polynucleotide of embodiment 82 or embodiment 83, further comprising at least one promoter that is operatively linked to control expression of the nucleic acid.

[0572] 85. The polynucleotide of any of embodiments 83-84, wherein the promoter is a constitutive promoter.

[0573] 86. The polynucleotide of any of embodiments 83-85, wherein the promoter is an inducible promoter.

[0574] 87. The polynucleotide of any of embodiments 82-86, wherein the sdAb variable domain is attached to the G protein via an encoded peptide linker.

[0575] 88. The polynucleotide of any of embodiments 86-87, wherein the encoded peptide linker comprises up to 65 amino acids in length.

[0576] 89. The polynucleotide of any of embodiments 86-87, wherein the encoded peptide linker comprises from or from about 2 to 65 amino acids, 2 to 60 amino acids, 2 to 56 amino acids, 2 to 52 amino acids, 2 to 48 amino acids, 2 to 44 amino acids, 2 to 40 amino acids, 2 to 36 amino acids, 2 to 32 amino acids, 2 to 28 amino acids, 2 to 24 amino acids, 2 to 20 amino acids, 2 to 18 amino acids, 2 to 14 amino acids, 2 to 12 amino acids, 2 to 10 amino acids, 2 to 8 amino acids, 2 to 6 amino acids, 6 to 65 amino acids, 6 to 60 amino acids, 6 to 56 amino acids, 6 to 52 amino acids, 6 to 48 amino acids, 6 to 44 amino acids, 6 to 40 amino acids, 6 to 36 amino acids, 6 to 32 amino acids, 6 to 28 amino acids, 6 to 24 amino acids, 6 to 20 amino acids, 6 to 18 amino acids, 6 to 14 amino acids, 6 to 12 amino acids, 6 to 10 amino acids, 6 to 8 amino acids, 8 to 65 amino acids, 8 to 60 amino acids, 8 to 56 amino acids, 8 to 52 amino acids, 8 to 48 amino acids, 8 to 44 amino acids, 8 to 40 amino acids, 8 to 36 amino acids, 8 to 32 amino acids, 8 to 28 amino acids, 8 to 24 amino acids, 8 to 20 amino acids, 8 to 18 amino acids, 8 to 14 amino acids, 8 to 12 amino acids, 8 to 10 amino acids, 10 to 65 amino acids, 10 to 60 amino acids, 10 to 56 amino acids, 10 to 52 amino acids, 10 to 48 amino acids, 10 to 44 amino acids, 10 to 40 amino acids, 10 to 36 amino acids, 10 to 32 amino acids, 10 to 28 amino acids, 10 to 24 amino acids, 10 to 20 amino acids, 10 to 18 amino acids, 10 to 14 amino acids, 10 to 12 amino acids, 12 to 65 amino acids, 12 to 60 amino acids, 12 to 56 amino acids, 12 to 52 amino acids, 12 to 48 amino acids, 12 to 44 amino acids, 12 to 40 amino acids, 12 to 36 amino acids, 12 to 32 amino acids, 12 to 28 amino acids, 12 to 24 amino acids, 12 to 20 amino acids, 12 to 18 amino acids, 12 to 14 amino acids, 14 to 65 amino acids, 14 to 60 amino acids, 14 to 56 amino acids, 14 to 52 amino acids, 14 to 48 amino acids, 14 to 44 amino acids, 14 to 40 amino acids, 14 to 36 amino acids, 14 to 32 amino acids, 14 to 28 amino acids, 14 to 24 amino acids, 14 to 20 amino acids, 14 to 18 amino acids, 18 to 65 amino acids, 18 to 60 amino acids, 18 to 56 amino acids, 18 to 52 amino acids, 18 to 48 amino acids, 18 to 44 amino acids, 18 to 40 amino acids, 18 to 36 amino acids, 18 to 32 amino acids, 18 to 28 amino acids, 18 to 24 amino acids, 18 to 20 amino acids, 20 to 65 amino acids, 20 to 60 amino acids, 20 to 56 amino acids, 20 to 52 amino acids, 20 to 48 amino acids, 20 to 44 amino acids, 20 to 40 amino acids, 20 to 36 amino acids, 20 to 32 amino acids, 20 to 28 amino acids, 20 to 26 amino acids, 20 to 24 amino acids, 24 to 65 amino acids, 24 to 60 amino acids, 24 to 56 amino acids, 24 to 52 amino acids, 24 to 48 amino acids, 24 to 44 amino acids, 24 to 40 amino acids, 24 to 36 amino acids, 24 to 32 amino acids, 24 to 30 amino acids, 24 to 28 amino acids, 28 to 65 amino acids, 28 to 60 amino acids, 28 to 56 amino acids, 28 to 52 amino acids, 28 to 48 amino acids, 28 to 44 amino acids, 28 to 40 amino acids, 28 to 36 amino acids, 28 to 34 amino acids, 28 to 32 amino acids, 32 to 65 amino acids, 32 to 60 amino acids, 32 to 56 amino acids, 32 to 52 amino acids, 32 to 48 amino acids, 32 to 44 amino acids, 32 to 40 amino acids, 32 to 38 amino acids, 32 to 36 amino acids, 36 to 65 amino acids, 36 to 60 amino acids, 36 to 56 amino acids, 36 to 52 amino acids, 36 to 48 amino acids, 36 to 44 amino acids, 36 to 40 amino acids, 40 to 65 amino acids, 40 to 60 amino acids, 40 to 56 amino acids, 40 to 52 amino acids, 40 to 48 amino acids, 40 to 44 amino acids, 44 to 65 amino acids, 44 to 60 amino acids, 44 to 56 amino acids, 44 to 52 amino acids, 44 to 48 amino acids, 48 to 65 amino acids, 48 to 60 amino acids, 48 to 56 amino acids, 48 to 52 amino acids, 50 to 65 amino acids, 50 to 60 amino acids, 50 to 56 amino acids, 50 to 52 amino acids, 54 to 65 amino acids, 54 to 60 amino acids, 54 to 56 amino acids, 58 to 65 amino acids, 58 to 60 amino acids, or 60 to 65 amino acids.

[0577] 90. The polynucleotide of any of embodiments 86-87, wherein the encoded peptide linker comprises a polypeptide that is 3, 4, 5, 6, 7, 8, 9, 10, 11, 12, 13, 14, 15, 16, 17, 18, 19, 20, 21, 22, 23, 24, 25, 26, 27, 28, 29, 30, 31, 32, 33, 34, 35, 36, 37, 38, 39, 40, 41, 42, 43, 44, 45, 46, 47, 48, 49, 50, 51, 52, 53, 54, 55, 56, 57, 58, 59, 60, 61, 62, 63, 64 or 65 amino acids in length.

[0578] 91. The polynucleotide of any of embodiments 86-87, wherein the encoded peptide linker comprises GS, GGS, GGGGS (SEQ ID NO:43), GGGGGS (SEQ ID NO:41) and combinations thereof.

[0579] 92. The polynucleotide of any of embodiments 86-87, wherein the encoded peptide linker comprises (GGS)n, wherein n is 1 to 10.

[0580] 93. The polynucleotide of any of embodiments 86-87, wherein the encoded peptide linker comprises (GGGGS)n (SEQ ID NO:42), wherein n is 1 to 10. 94. The polynucleotide of any of embodiments 86-87, wherein the encoded peptide linker comprises (GGGGGS)n (SEQ ID NO:27), wherein n is 1 to 4.

[0581] 95. The polynucleotide of any of embodiments 86-87, wherein the nucleic acid sequence encoding the G protein is a wild-type Nipah virus G (NiV-G) protein or a Hendra virus G protein or is a variant thereof that exhibits reduced binding for the native binding partner.

[0582] 96. The polynucleotide of any of embodiments 82-95, wherein the nucleic acid sequence encoding the G protein is a wild-type NiV-G protein.

[0583] 97. The polynucleotide of any of embodiments 82-95, wherein the nucleic acid sequence encoding the G-protein is a mutant NiV-G protein that exhibits reduced binding to Ephrin B2 or Ephrin B3.

[0584] 98. The polynucleotide of embodiment 97, wherein the nucleic acid sequence encoding the mutant NiV-G protein comprises an amino acid sequence having at least at or about 80%, at least at or about 81%, at least at or about 82%, at least at or about 83%, at or about 84%, at least at or about 85%, at least at or about 86%, or at least at or about 87%, at least at or about 88%, or at least at or about 89%, at least at or about 90%, at least at or about 91%, at least at or about 92%, at least at or about 93%, at least at or about 94%, at least at or about 95%, at or about 96%, at least at or about 97%, at least at or about 98%, or at least at or about 99% sequence identity to SEQ ID NO: 9, SEQ ID NO:28 or SEQ ID NO: 44.

[0585] 99. The polynucleotide of any of embodiments 82-95 and 97, wherein the nucleic acid sequence encoding the mutant NiV-G protein comprises the sequence set forth in any of SEQ ID NOS: 10-15, 35-40 or 45-50 or an amino acid sequence having at least at or about 80%, at least at or about 81%, at least at or about 82%, at least at or about 83%, at or about 84%, at least at or about 85%, at least at or about 86%, or at least at or about 87%, at least at or about 88%, or at least at or about 89%, at least at or about 90%, at least at or about 91%, at least at or about 92%, at least at or about 93%, at least at or about 94%, at least at or about 95%, at or about 96%, at least at or about 97%, at least at or about 98%, or at least at or about 99% sequence identity to SEQ ID NOs: 10-15, 35-40 or 45-50.

[0586] 100. The polynucleotide of any of embodiments 97-99, wherein the nucleic acid sequence encoding the mutant NiV-G protein comprises a 5 amino acid truncation at or near the N-terminus of the wild-type NiV-G protein (SEQ ID NO: 9, SEQ ID NO:28 or SEQ ID NO: 44).

[0587] 101. The polynucleotide of embodiment 100, wherein the nucleic acid sequence encoding the mutant NiV-G protein comprises the amino acid sequence set forth in SEQ ID NO: 10 or an amino acid sequence having at least at or about 80%, at least at or about 81%, at least at or about 82%, at least at or about 83%, at or about 84%, at least at or about 85%, at least at or about 86%, or at least at or about 87%, at least at or about 88%, or at least at or about 89%, at least at or about 90%, at least at or about 91%, at least at or about 92%, at least at or about 93%, at least at or about 94%, at least at or about 95%, at or about 96%, at least at or about 97%, at least at or about 98%, or at least at or about 99% sequence identity to SEQ ID NO:10.

[0588] 102. The polynucleotide of embodiment 100, wherein the nucleic acid sequence encoding the mutant NiV-G protein comprises the amino acid sequence set forth in SEQ ID NO: 35 or an amino acid sequence having at least at or about 80%, at least at or about 81%, at least at or about 82%, at least at or about 83%, at or about 84%, at least at or about 85%, at least at or about 86%, or at least at or about 87%, at least at or about 88%, or at least at or about 89%, at least at or about 90%, at least at or about 91%, at least at or about 92%, at least at or about 93%, at least at or about 94%, at least at or about 95%, at or about 96%, at least at or about 97%, at least at or about 98%, or at least at or about 99% sequence identity to SEQ ID NO:35.

[0589] 103. The polynucleotide of embodiment 100, wherein the nucleic acid sequence encoding the mutant NiV-G protein comprises the amino acid sequence set forth in SEQ ID NO: 45 or an amino acid sequence having at least at or about 80%, at least at or about 81%, at least at or about 82%, at least at or about 83%, at or about 84%, at least at or about 85%, at least at or about 86%, or at least at or about 87%, at least at or about 88%, or at least at or about 89%, at least at or about 90%, at least at or about 91%, at least at or about 92%, at least at or about 93%, at least at or about 94%, at least at or about 95%, at or about 96%, at least at or about 97%, at least at or about 98%, or at least at or about 99% sequence identity to SEQ ID NO:45.

[0590] 104. The polynucleotide of any of embodiments 97-99, wherein the nucleic acid sequence encoding the mutant NiV-G protein comprises a 10 amino acid truncation at or near the N-terminus of the wild-type NiV-G protein (SEQ ID NO: 9, SEQ ID NO:28 or SEQ ID NO: 44).

[0591] 105. The polynucleotide of embodiment 104, wherein the nucleic acid sequence encoding the mutant NiV-G protein comprises the amino acid sequence set forth in SEQ ID NO: 11 or an amino acid sequence having at least at or about 80%, at least at or about 81%, at least at or about 82%, at least at or about 83%, at or about 84%, at least at or about 85%, at least at or about 86%, or at least at or about 87%, at least at or about 88%, or at least at or about 89%, at least at or about 90%, at least at or about 91%, at least at or about 92%, at least at or about 93%, at least at or about 94%, at least at or about 95%, at or about 96%, at least at or about 97%, at least at or about 98%, or at least at or about 99% sequence identity to SEQ ID NO:11.

[0592] 106. The polynucleotide of embodiment 104, wherein the nucleic acid sequence encoding the mutant NiV-G protein comprises the amino acid sequence set forth in SEQ ID NO: 36 or an amino acid sequence having at least at or about 80%, at least at or about 81%, at least at or about 82%, at least at or about 83%, at or about 84%, at least at or about 85%, at least at or about 86%, or at least at or about 87%, at least at or about 88%, or at least at or about 89%, at least at or about 90%, at least at or about 91%, at least at or about 92%, at least at or about 93%, at least at or about 94%, at least at or about 95%, at or about 96%, at least at or about 97%, at least at or about 98%, or at least at or about 99% sequence identity to SEQ ID NO:36.

[0593] 107. The polynucleotide of embodiment 104, wherein the nucleic acid sequence encoding the mutant NiV-G protein comprises the amino acid sequence set forth in SEQ ID NO: 46 or an amino acid sequence having at least at or about 80%, at least at or about 81%, at least at or about 82%, at least at or about 83%, at or about 84%, at least at or about 85%, at least at or about 86%, or at least at or about 87%, at least at or about 88%, or at least at or about 89%, at least at or about 90%, at least at or about 91%, at least at or about 92%, at least at or about 93%, at least at or about 94%, at least at or about 95%, at or about 96%, at least at or about 97%, at least at or about 98%, or at least at or about 99% sequence identity to SEQ ID NO:46.

[0594] 108. The polynucleotide of any of embodiments 97-99, wherein the nucleic acid sequence encoding the mutant NiV-G protein comprises a 15 amino acid truncation at or near the N-terminus of the wild-type NiV-G protein (SEQ ID NO: 9, SEQ ID NO:28 or SEQ ID NO: 44).

[0595] 109. The polynucleotide of embodiment 108, wherein the nucleic acid sequence encoding the mutant NiV-G protein comprises the amino acid sequence set forth in SEQ ID NO: 12 or an amino acid sequence having at least at or about 80%, at least at or about 81%, at least at or about 82%, at least at or about 83%, at or about 84%, at least at or about 85%, at least at or about 86%, or at least at or about 87%, at least at or about 88%, or at least at or about 89%, at least at or about 90%, at least at or about 91%, at least at or about 92%, at least at or about 93%, at least at or about 94%, at least at or about 95%, at or about 96%, at least at or about 97%, at least at or about 98%, or at least at or about 99% sequence identity to SEQ ID NO:12.

[0596] 110. The polynucleotide of embodiment 108, wherein the nucleic acid sequence encoding the mutant NiV-G protein comprises the amino acid sequence set forth in SEQ ID NO: 37 or an amino acid sequence having at least at or about 80%, at least at or about 81%, at least at or about 82%, at least at or about 83%, at or about 84%, at least at or about 85%, at least at or about 86%, or at least at or about 87%, at least at or about 88%, or at least at or about 89%, at least at or about 90%, at least at or about 91%, at least at or about 92%, at least at or about 93%, at least at or about 94%, at least at or about 95%, at or about 96%, at least at or about 97%, at least at or about 98%, or at least at or about 99% sequence identity to SEQ ID NO:37.

[0597] 111. The polynucleotide of embodiment 108, wherein the nucleic acid sequence encoding the mutant NiV-G protein comprises the amino acid sequence set forth in SEQ ID NO: 47 or an amino acid sequence having at least at or about 80%, at least at or about 81%, at least at or about 82%, at least at or about 83%, at or about 84%, at least at or about 85%, at least at or about 86%, or at least at or about 87%, at least at or about 88%, or at least at or about 89%, at least at or about 90%, at least at or about 91%, at least at or about 92%, at least at or about 93%, at least at or about 94%, at least at or about 95%, at or about 96%, at least at or about 97%, at least at or about 98%, or at least at or about 99% sequence identity to SEQ ID NO:47.

[0598] 112. The polynucleotide of any of embodiments 97-99, wherein the nucleic acid sequence encoding the mutant NiV-G protein comprises a 20 amino acid truncation at or near the N-terminus of the wild-type NiV-G protein (SEQ ID NO: 9, SEQ ID NO:28 or SEQ ID NO: 44).

[0599] 113. The polynucleotide of embodiment 112, wherein the nucleic acid sequence encoding the mutant NiV-G protein comprises the amino acid sequence set forth in SEQ ID NO: 13 or an amino acid sequence having at least at or about 80%, at least at or about 81%, at least at or about 82%, at least at or about 83%, at or about 84%, at least at or about 85%, at least at or about 86%, or at least at or about 87%, at least at or about 88%, or at least at or about 89%, at least at or about 90%, at least at or about 91%, at least at or about 92%, at least at or about 93%, at least at or about 94%, at least at or about 95%, at or about 96%, at least at or about 97%, at least at or about 98%, or at least at or about 99% sequence identity to SEQ ID NO:13.

[0600] 114. The polynucleotide of embodiment 112, wherein the nucleic acid sequence encoding the mutant NiV-G protein comprises the amino acid sequence set forth in SEQ ID NO: 38 or an amino acid sequence having at least at or about 80%, at least at or about 81%, at least at or about 82%, at least at or about 83%, at or about 84%, at least at or about 85%, at least at or about 86%, or at least at or about 87%, at least at or about 88%, or at least at or about 89%, at least at or about 90%, at least at or about 91%, at least at or about 92%, at least at or about 93%, at least at or about 94%, at least at or about 95%, at or about 96%, at least at or about 97%, at least at or about 98%, or at least at or about 99% sequence identity to SEQ ID NO:38.

[0601] 115. The polynucleotide of embodiment 112, wherein the nucleic acid sequence encoding the mutant NiV-G protein comprises the amino acid sequence set forth in SEQ ID NO: 48 or an amino acid sequence having at least at or about 80%, at least at or about 81%, at least at or about 82%, at least at or about 83%, at or about 84%, at least at or about 85%, at least at or about 86%, or at least at or about 87%, at least at or about 88%, or at least at or about 89%, at least at or about 90%, at least at or about 91%, at least at or about 92%, at least at or about 93%, at least at or about 94%, at least at or about 95%, at or about 96%, at least at or about 97%, at least at or about 98%, or at least at or about 99% sequence identity to SEQ ID NO:48.

[0602] 116. The polynucleotide of any of embodiments 97-99, wherein the nucleic acid sequence encoding the mutant NiV-G protein comprises a 25 amino acid truncation at or near the N-terminus of the wild-type NiV-G protein (SEQ ID NO: 9, SEQ ID NO:28 or SEQ ID NO: 44).

[0603] 117. The polynucleotide of embodiment 116, wherein the nucleic acid sequence encoding the mutant NiV-G protein comprises the amino acid sequence set forth in SEQ ID NO: 14 or an amino acid sequence having at least at or about 80%, at least at or about 81%, at least at or about 82%, at least at or about 83%, at or about 84%, at least at or about 85%, at least at or about 86%, or at least at or about 87%, at least at or about 88%, or at least at or about 89%, at least at or about 90%, at least at or about 91%, at least at or about 92%, at least at or about 93%, at least at or about 94%, at least at or about 95%, at or about 96%, at least at or about 97%, at least at or about 98%, or at least at or about 99% sequence identity to SEQ ID NO:14.

[0604] 118. The polynucleotide of embodiment 116, wherein the nucleic acid sequence encoding the mutant NiV-G protein comprises the amino acid sequence set forth in SEQ ID NO: 39 or an amino acid sequence having at least at or about 80%, at least at or about 81%, at least at or about 82%, at least at or about 83%, at or about 84%, at least at or about 85%, at least at or about 86%, or at least at or about 87%, at least at or about 88%, or at least at or about 89%, at least at or about 90%, at least at or about 91%, at least at or about 92%, at least at or about 93%, at least at or about 94%, at least at or about 95%, at or about 96%, at least at or about 97%, at least at or about 98%, or at least at or about 99% sequence identity to SEQ ID NO:39.

[0605] 119. The polynucleotide of embodiment 116, wherein the nucleic acid sequence encoding the mutant NiV-G protein comprises the amino acid sequence set forth in SEQ ID NO: 49 or an amino acid sequence having at least at or about 80%, at least at or about 81%, at least at or about 82%, at least at or about 83%, at or about 84%, at least at or about 85%, at least at or about 86%, or at least at or about 87%, at least at or about 88%, or at least at or about 89%, at least at or about 90%, at least at or about 91%, at least at or about 92%, at least at or about 93%, at least at or about 94%, at least at or about 95%, at or about 96%, at least at or about 97%, at least at or about 98%, or at least at or about 99% sequence identity to SEQ ID NO:49.

[0606] 120. The polynucleotide of any of embodiments 97-99, wherein the nucleic acid sequence encoding the mutant NiV-G protein comprises a 30 amino acid truncation at or near the N-terminus of the wild-type NiV-G protein (SEQ ID NO: 9, SEQ ID NO:28 or SEQ ID NO: 44).

[0607] 121. The polynucleotide of embodiment 120, wherein the nucleic acid sequence encoding the mutant NiV-G protein comprises the amino acid sequence set forth in SEQ ID NO: 15 or an amino acid sequence having at least at or about 80%, at least at or about 81%, at least at or about 82%, at least at or about 83%, at or about 84%, at least at or about 85%, at least at or about 86%, or at least at or about 87%, at least at or about 88%, or at least at or about 89%, at least at or about 90%, at least at or about 91%, at least at or about 92%, at least at or about 93%, at least at or about 94%, at least at or about 95%, at or about 96%, at least at or about 97%, at least at or about 98%, or at least at or about 99% sequence identity to SEQ ID NO:15.

[0608] 122. The polynucleotide of embodiment 120, wherein the nucleic acid sequence encoding the mutant NiV-G protein comprises the amino acid sequence set forth in SEQ ID NO: 40 or an amino acid sequence having at least at or about 80%, at least at or about 81%, at least at or about 82%, at least at or about 83%, at or about 84%, at least at or about 85%, at least at or about 86%, or at least at or about 87%, at least at or about 88%, or at least at or about 89%, at least at or about 90%, at least at or about 91%, at least at or about 92%, at least at or about 93%, at least at or about 94%, at least at or about 95%, at or about 96%, at least at or about 97%, at least at or about 98%, or at least at or about 99% sequence identity to SEQ ID NO:40.

[0609] 123. The polynucleotide of embodiment 120, wherein the nucleic acid sequence encoding the mutant NiV-G protein comprises the amino acid sequence set forth in SEQ ID NO: 50 or an amino acid sequence having at least at or about 80%, at least at or about 81%, at least at or about 82%, at least at or about 83%, at or about 84%, at least at or about 85%, at least at or about 86%, or at least at or about 87%, at least at or about 88%, or at least at or about 89%, at least at or about 90%, at least at or about 91%, at least at or about 92%, at least at or about 93%, at least at or about 94%, at least at or about 95%, at or about 96%, at least at or about 97%, at least at or about 98%, or at least at or about 99% sequence identity to SEQ ID NO: 50.

[0610] 124. The polynucleotide of any of embodiments 97-99, wherein the nucleic acid sequence encoding the mutant NiV-G protein comprises:

[0611] i) a truncation at or near the N-terminus; and

[0612] ii) point mutations selected from the group consisting of E501A, W504A, Q530A and E533A.

[0613] 125. The polynucleotide of embodiment 124, wherein the nucleic acid sequence encoding the mutant NiV-G protein comprises the amino acid sequence set forth in SEQ ID NO: 16 or an amino acid sequence having at least at or about 80%, at least at or about 81%, at least at or about 82%, at least at or about 83%, at or about 84%, at least at or about 85%, at least at or about 86%, or at least at or about 87%, at least at or about 88%, or at least at or about 89%, at least at or about 90%, at least at or about 91%, at least at or about 92%, at least at or about 93%, at least at or about 94%, at least at or about 95%, at or about 96%, at least at or about 97%, at least at or about 98%, or at least at or about 99% sequence identity to SEQ ID NO:16.

[0614] 126. The polynucleotide of embodiment 124, wherein the nucleic acid sequence encoding the mutant NiV-G protein comprises the amino acid sequence set forth in SEQ ID NO: 51 or an amino acid sequence having at least at or about 80%, at least at or about 81%, at least at or about 82%, at least at or about 83%, at or about 84%, at least at or about 85%, at least at or about 86%, or at least at or about 87%, at least at or about 88%, or at least at or about 89%, at least at or about 90%, at least at or about 91%, at least at or about 92%, at least at or about 93%, at least at or about 94%, at least at or about 95%, at or about 96%, at least at or about 97%, at least at or about 98%, or at least at or about 99% sequence identity to SEQ ID NO:51.

[0615] 127. A vector, comprising the polynucleotide of any of embodiments 82-126.

[0616] 128. The vector of embodiment 127, wherein the vector is a mammalian vector, viral vector or artificial chromosome, optionally wherein the artificial chromosome is a bacterial artificial chromosome (BAC).

[0617] 129. A cell comprising the polynucleotide of any of embodiments 82-126 or the vector of embodiment 127 or embodiment 128.

[0618] 130. A method of making a targeted lipid particle comprising a henipavirus F protein molecule or biologically active portion thereof and a targeted envelope protein comprising a henipavirus envelope attachment glycoprotein G (G protein) or a biologically active portion thereof and a single domain antibody (sdAb) variable domain comprising:

[0619] a) providing a cell that comprises a nucleic acid encoding a henipavirus F protein molecule or biologically active portion thereof and a nucleic acid encoding a targeted envelope protein comprising a henipavirus envelope attachment glycoprotein G (G protein) or a biologically active portion thereof and a single domain antibody (sdAb) variable domain;

[0620] b) culturing the cell under conditions that allow for production of a targeted lipid particle, and

[0621] c) separating, enriching, or purifying the targeted lipid particle from the cell, thereby making the targeted lipid particle.

[0622] 131. A method of making a targeted lipid particle comprising a henipavirus F protein molecule or biologically active portion thereof and a targeted envelope protein comprising a henipavirus envelope attachment glycoprotein G (G protein) or a biologically active portion thereof and a single domain antibody (sdAb) variable domain, comprising:

[0623] a) providing a cell that comprises the polynucleotide of any of embodiments 82-126 or the vector of embodiment 127 or embodiment 128;

[0624] b) providing the cell a polynucleotide encoding a henipavirus F protein molecule or biologically active portion thereof;

[0625] c) culturing the cell under conditions that allow for production of a targeted lipid particle, and

[0626] d) separating, enriching, or purifying the targeted lipid particle particle from the cell, thereby making the targeted lipid particle.

[0627] 132. The method of embodiment 130 or embodiment 131, wherein the cell is a mammalian cell.

[0628] 133. The method of any of embodiments 130-131, wherein the cell is a producer cell and the targeted lipid particle is a viral particle or a viral-like particle, optionally a retroviral particle or a retroviral-like particle, optionally a lentiviral particle or lentiviral-like particle.

[0629] 134. A producer cell comprising (i) a viral nucleic acid(s) and (ii) nucleic acid encoding a henipavirus F protein molecule or biologically active portion thereof and (iii) a nucleic acid encoding a targeted envelope protein comprising a henipavirus envelope attachment glycoprotein G (G protein) or a biologically active portion thereof and a single domain antibody (sdAb) variable domain, optionally wherein the viral nucleic acid(s) are lentiviral nucleic acids.

[0630] 135. The producer cell of embodiment 134, wherein the viral nucleic acid(s) lacks one or more genes involved in viral replication.

[0631] 136. The producer cell of embodiment 134 or embodiment 135, wherein the viral nucleic acid comprises a nucleic acid encoding a viral packaging protein selected from one or more of Gag, Pol, Rev and Tat.

[0632] 137. The producer cell of any of embodiments 134-136, wherein the viral nucleic acid comprises:

[0633] one or more of (e.g., all of) the following nucleic acid sequences: 5′ LTR (e.g., comprising U5 and lacking a functional U3 domain), Psi packaging element (Psi), Central polypurine tract (cPPT)/central termination sequence (CTS) (e.g. DNA flap), Poly A tail sequence, a posttranscriptional regulatory element (e.g. WPRE), a Rev response element (RRE), and 3′ LTR (e.g., comprising U5 and lacking a functional U3);

[0634] 138. The producer cell of any of embodiments 134-137, wherein the henipavirus F protein molecule or biologically active portion thereof comprises:

[0635] (i) the sequence set forth in SEQ ID NO: 2;

[0636] (ii) an amino acid sequence having at or about 80%, at least at or about 81%, at least at or about 82%, at least at or about 83%, at or about 84%, at least at or about 85%, at least at or about 86%, or at least at or about 87%, at least at or about 88%, or at least at or about 89%, at least at or about 90%, at least at or about 91%, at least at or about 92%, at least at or about 93%, at least at or about 94%, at least at or about 95%, at least at or about 96%, at least at or about 97%, at least at or about 98%, or at least at or about 99% sequence identity to SEQ ID NO:2.

[0637] 139. The producer cell of any of embodiments 134-137, wherein the henipavirus F protein molecule or biologically active portion thereof comprises:

[0638] (i) the sequence set forth in SEQ ID NO: 5;

[0639] (ii) an amino acid sequence having at or about 80%, at least at or about 81%, at least at or about 82%, at least at or about 83%, at or about 84%, at least at or about 85%, at least at or about 86%, or at least at or about 87%, at least at or about 88%, or at least at or about 89%, at least at or about 90%, at least at or about 91%, at least at or about 92%, at least at or about 93%, at least at or about 94%, at least at or about 95%, at least at or about 96%, at least at or about 97%, at least at or about 98%, or at least at or about 99% sequence identity to SEQ ID NO:5.

[0640] 140. The producer cell of any of embodiments 134-137, wherein the henipavirus F protein molecule or biologically active portion thereof comprises:

[0641] (i) the sequence set forth in SEQ ID NO: 7;

[0642] (ii) an amino acid sequence having at or about 80%, at least at or about 81%, at least at or about 82%, at least at or about 83%, at or about 84%, at least at or about 85%, at least at or about 86%, or at least at or about 87%, at least at or about 88%, or at least at or about 89%, at least at or about 90%, at least at or about 91%, at least at or about 92%, at least at or about 93%, at least at or about 94%, at least at or about 95%, at least at or about 96%, at least at or about 97%, at least at or about 98%, or at least at or about 99% sequence identity to SEQ ID NO:7.

[0643] 141. The producer cell of any of embodiments 134-137, wherein the henipavirus F protein molecule or biologically active portion thereof comprises:

[0644] (i) a sequence encoding by a nucleotide sequence encoding the sequence set forth in SEQ ID NO: 8;

[0645] (ii) a amino acid sequence encoded by a nucleotide sequence encoding a sequence having at or about 80%, at least at or about 81%, at least at or about 82%, at least at or about 83%, at or about 84%, at least at or about 85%, at least at or about 86%, or at least at or about 87%, at least at or about 88%, or at least at or about 89%, at least at or about 90%, at least at or about 91%, at least at or about 92%, at least at or about 93%, at least at or about 94%, at least at or about 95%, at least at or about 96%, at least at or about 97%, at least at or about 98%, or at least at or about 99% sequence identity to SEQ ID NO:8.

[0646] 142. The producer cell of any of embodiments 134-137, wherein the henipavirus F protein molecule or biologically active portion thereof comprises:

[0647] (i) the sequence set forth in SEQ ID NO: 23;

[0648] (ii) an amino acid sequence having at or about 80%, at least at or about 81%, at least at or about 82%, at least at or about 83%, at or about 84%, at least at or about 85%, at least at or about 86%, or at least at or about 87%, at least at or about 88%, or at least at or about 89%, at least at or about 90%, at least at or about 91%, at least at or about 92%, at least at or about 93%, at least at or about 94%, at least at or about 95%, at least at or about 96%, at least at or about 97%, at least at or about 98%, or at least at or about 99% sequence identity to SEQ ID NO:23.

[0649] 143. The producer cell of any of embodiments 134-142, wherein the henipavirus envelope attachment glycoprotein G (G protein) or a biologically active portion thereof comprises:

[0650] (i) the sequence set forth in SEQ ID NO: 9, SEQ ID NO:28 or SEQ ID NO:44;

[0651] (ii) an amino acid sequence having at or about 80%, at least at or about 81%, at least at or about 82%, at least at or about 83%, at or about 84%, at least at or about 85%, at least at or about 86%, or at least at or about 87%, at least at or about 88%, or at least at or about 89%, at least at or about 90%, at least at or about 91%, at least at or about 92%, at least at or about 93%, at least at or about 94%, at least at or about 95%, at least at or about 96%, at least at or about 97%, at least at or about 98%, or at least at or about 99% sequence identity to SEQ ID NO: 9, SEQ ID NO:28 or SEQ ID NO:44.

[0652] 144. The producer cell of any of embodiments 134-142, wherein the henipavirus envelope attachment glycoprotein G (G protein) or a biologically active portion thereof comprises:

[0653] (i) the sequence set forth in SEQ ID NO: 10;

[0654] (ii) an amino acid sequence having at least at or about 80%, at least at or about 81%, at least at or about 82%, at least at or about 83%, at or about 84%, at least at or about 85%, at least at or about 86%, or at least at or about 87%, at least at or about 88%, or at least at or about 89%, at or about 90%, at least at or about 91%, at least at or about 92%, at least at or about 93%, at least at or about 94%, at least at or about 95%, at least at or about 96%, at least at or about 97%, at least at or about 98%, or at least at or about 99% sequence identity to SEQ ID NO:10.

[0655] 145. The producer cell of any of embodiments 134-142, wherein the henipavirus envelope attachment glycoprotein G (G protein) or a biologically active portion thereof comprises:

[0656] (i) the sequence set forth in SEQ ID NO: 35;

[0657] (ii) an amino acid sequence having at least at or about 80%, at least at or about 81%, at least at or about 82%, at least at or about 83%, at or about 84%, at least at or about 85%, at least at or about 86%, or at least at or about 87%, at least at or about 88%, or at least at or about 89%, at or about 90%, at least at or about 91%, at least at or about 92%, at least at or about 93%, at least at or about 94%, at least at or about 95%, at least at or about 96%, at least at or about 97%, at least at or about 98%, or at least at or about 99% sequence identity to SEQ ID NO:35.

[0658] 146. The producer cell of any of embodiments 134-142, wherein the henipavirus envelope attachment glycoprotein G (G protein) or a biologically active portion thereof comprises:

[0659] (i) the sequence set forth in SEQ ID NO: 45;

[0660] (ii) an amino acid sequence having at least at or about 80%, at least at or about 81%, at least at or about 82%, at least at or about 83%, at or about 84%, at least at or about 85%, at least at or about 86%, or at least at or about 87%, at least at or about 88%, or at least at or about 89%, at or about 90%, at least at or about 91%, at least at or about 92%, at least at or about 93%, at least at or about 94%, at least at or about 95%, at least at or about 96%, at least at or about 97%, at least at or about 98%, or at least at or about 99% sequence identity to SEQ ID NO:45.

[0661] 147. The producer cell of any of embodiments 134-142, wherein the henipavirus envelope attachment glycoprotein G (G protein) or a biologically active portion thereof comprises:

[0662] (i) the sequence set forth in SEQ ID NO: 11;

[0663] (ii) an amino acid sequence having at or about 80%, at least at or about 81%, at least at or about 82%, at least at or about 83%, at or about 84%, at least at or about 85%, at least at or about 86%, or at least at or about 87%, at least at or about 88%, or at least at or about 89%, at least at or about 90%, at least at or about 91%, at least at or about 92%, at least at or about 93%, at least at or about 94%, at least at or about 95%, at least at or about 96%, at least at or about 97%, at least at or about 98%, or at least at or about 99% sequence identity to SEQ ID NO:11.

[0664] 148. The producer cell of any of embodiments 134-142, wherein the henipavirus envelope attachment glycoprotein G (G protein) or a biologically active portion thereof comprises:

[0665] (i) the sequence set forth in SEQ ID NO: 36;

[0666] (ii) an amino acid sequence having at or about 80%, at least at or about 81%, at least at or about 82%, at least at or about 83%, at or about 84%, at least at or about 85%, at least at or about 86%, or at least at or about 87%, at least at or about 88%, or at least at or about 89%, at least at or about 90%, at least at or about 91%, at least at or about 92%, at least at or about 93%, at least at or about 94%, at least at or about 95%, at least at or about 96%, at least at or about 97%, at least at or about 98%, or at least at or about 99% sequence identity to SEQ ID NO:36.

[0667] 149. The producer cell of any of embodiments 134-142, wherein the henipavirus envelope attachment glycoprotein G (G protein) or a biologically active portion thereof comprises:

[0668] (i) the sequence set forth in SEQ ID NO: 46;

[0669] (ii) an amino acid sequence having at or about 80%, at least at or about 81%, at least at or about 82%, at least at or about 83%, at or about 84%, at least at or about 85%, at least at or about 86%, or at least at or about 87%, at least at or about 88%, or at least at or about 89%, at least at or about 90%, at least at or about 91%, at least at or about 92%, at least at or about 93%, at least at or about 94%, at least at or about 95%, at least at or about 96%, at least at or about 97%, at least at or about 98%, or at least at or about 99% sequence identity to SEQ ID NO:46.

[0670] 150. The producer cell of any of embodiments 134-142, wherein the henipavirus envelope attachment glycoprotein G (G protein) or a biologically active portion thereof comprises:

[0671] (i) the sequence set forth in SEQ ID NO: 12;

[0672] (ii) an amino acid sequence having at or about 80%, at least at or about 81%, at least at or about 82%, at least at or about 83%, at or about 84%, at least at or about 85%, at least at or about 86%, or at least at or about 87%, at least at or about 88%, or at least at or about 89%, at least at or about 90%, at least at or about 91%, at least at or about 92%, at least at or about 93%, at least at or about 94%, at least at or about 95%, at least at or about 96%, at least at or about 97%, at least at or about 98%, or at least at or about 99% sequence identity to SEQ ID NO:12.

[0673] 151. The producer cell of any of embodiments 134-142, wherein the henipavirus envelope attachment glycoprotein G (G protein) or a biologically active portion thereof comprises:

[0674] (i) the sequence set forth in SEQ ID NO: 37;

[0675] (ii) an amino acid sequence having at or about 80%, at least at or about 81%, at least at or about 82%, at least at or about 83%, at or about 84%, at least at or about 85%, at least at or about 86%, or at least at or about 87%, at least at or about 88%, or at least at or about 89%, at least at or about 90%, at least at or about 91%, at least at or about 92%, at least at or about 93%, at least at or about 94%, at least at or about 95%, at least at or about 96%, at least at or about 97%, at least at or about 98%, or at least at or about 99% sequence identity to SEQ ID NO:37.

[0676] 152. The producer cell of any of embodiments 134-142, wherein the henipavirus envelope attachment glycoprotein G (G protein) or a biologically active portion thereof comprises:

[0677] (i) the sequence set forth in SEQ ID NO: 47;

[0678] (ii) an amino acid sequence having at or about 80%, at least at or about 81%, at least at or about 82%, at least at or about 83%, at or about 84%, at least at or about 85%, at least at or about 86%, or at least at or about 87%, at least at or about 88%, or at least at or about 89%, at least at or about 90%, at least at or about 91%, at least at or about 92%, at least at or about 93%, at least at or about 94%, at least at or about 95%, at least at or about 96%, at least at or about 97%, at least at or about 98%, or at least at or about 99% sequence identity to SEQ ID NO:47.

[0679] 153. The producer cell of any of embodiments 134-142, wherein the henipavirus envelope attachment glycoprotein G (G protein) or a biologically active portion thereof comprises:

[0680] (i) the sequence set forth in SEQ ID NO: 13;

[0681] (ii) an amino acid sequence having at or about 80%, at least at or about 81%, at least at or about 82%, at least at or about 83%, at or about 84%, at least at or about 85%, at least at or about 86%, or at least at or about 87%, at least at or about 88%, or at least at or about 89%, at least at or about 90%, at least at or about 91%, at least at or about 92%, at least at or about 93%, at least at or about 94%, at least at or about 95%, at least at or about 96%, at least at or about 97%, at least at or about 98%, or at least at or about 99% sequence identity to SEQ ID NO:13.

[0682] 154. The producer cell of any of embodiments 134-142, wherein the henipavirus envelope attachment glycoprotein G (G protein) or a biologically active portion thereof comprises:

[0683] (i) the sequence set forth in SEQ ID NO: 38;

[0684] (ii) an amino acid sequence having at or about 80%, at least at or about 81%, at least at or about 82%, at least at or about 83%, at or about 84%, at least at or about 85%, at least at or about 86%, or at least at or about 87%, at least at or about 88%, or at least at or about 89%, at least at or about 90%, at least at or about 91%, at least at or about 92%, at least at or about 93%, at least at or about 94%, at least at or about 95%, at least at or about 96%, at least at or about 97%, at least at or about 98%, or at least at or about 99% sequence identity to SEQ ID NO:38.

[0685] 155. The producer cell of any of embodiments 134-142, wherein the henipavirus envelope attachment glycoprotein G (G protein) or a biologically active portion thereof comprises:

[0686] (i) the sequence set forth in SEQ ID NO: 48;

[0687] (ii) an amino acid sequence having at or about 80%, at least at or about 81%, at least at or about 82%, at least at or about 83%, at or about 84%, at least at or about 85%, at least at or about 86%, or at least at or about 87%, at least at or about 88%, or at least at or about 89%, at least at or about 90%, at least at or about 91%, at least at or about 92%, at least at or about 93%, at least at or about 94%, at least at or about 95%, at least at or about 96%, at least at or about 97%, at least at or about 98%, or at least at or about 99% sequence identity to SEQ ID NO:48.

[0688] 156. The producer cell of any of embodiments 134-142, wherein the henipavirus envelope attachment glycoprotein G (G protein) or a biologically active portion thereof comprises:

[0689] (i) the sequence set forth in SEQ ID NO: 14;

[0690] (ii) an amino acid sequence having at least at or about 80%, at least at or about 81%, at least at or about 82%, at least at or about 83%, at or about 84%, at least at or about 85%, at least at or about 86%, or at least at or about 87%, at least at or about 88%, or at least at or about 89%, at least at or about 90%, at least at or about 91%, at least at or about 92%, at least at or about 93%, at least at or about 94%, at least at or about 95%, at least at or about 96%, at least at or about 97%, at least at or about 98%, or at least at or about 99% sequence identity to SEQ ID NO:14.

[0691] 157. The producer cell of any of embodiments 134-142, wherein the henipavirus envelope attachment glycoprotein G (G protein) or a biologically active portion thereof comprises:

[0692] (i) the sequence set forth in SEQ ID NO: 39;

[0693] (ii) an amino acid sequence having at least at or about 80%, at least at or about 81%, at least at or about 82%, at least at or about 83%, at or about 84%, at least at or about 85%, at least at or about 86%, or at least at or about 87%, at least at or about 88%, or at least at or about 89%, at least at or about 90%, at least at or about 91%, at least at or about 92%, at least at or about 93%, at least at or about 94%, at least at or about 95%, at least at or about 96%, at least at or about 97%, at least at or about 98%, or at least at or about 99% sequence identity to SEQ ID NO:39.

[0694] 158. The producer cell of any of embodiments 134-142, wherein the henipavirus envelope attachment glycoprotein G (G protein) or a biologically active portion thereof comprises:

[0695] (i) the sequence set forth in SEQ ID NO: 49;

[0696] (ii) an amino acid sequence having at least at or about 80%, at least at or about 81%, at least at or about 82%, at least at or about 83%, at or about 84%, at least at or about 85%, at least at or about 86%, or at least at or about 87%, at least at or about 88%, or at least at or about 89%, at least at or about 90%, at least at or about 91%, at least at or about 92%, at least at or about 93%, at least at or about 94%, at least at or about 95%, at least at or about 96%, at least at or about 97%, at least at or about 98%, or at least at or about 99% sequence identity to SEQ ID NO:49.

[0697] 159. The producer cell of any of embodiments 134-142, wherein the henipavirus envelope attachment glycoprotein G (G protein) or a biologically active portion thereof comprises:

[0698] (i) the sequence set forth in SEQ ID NO: 15;

[0699] (ii) an amino acid sequence having at least at or about 80%, at least at or about 81%, at least at or about 82%, at least at or about 83%, at or about 84%, at least at or about 85%, at least at or about 86%, or at least at or about 87%, at least at or about 88%, or at least at or about 89%, at least at or about 90%, at least at or about 91%, at least at or about 92%, at least at or about 93%, at least at or about 94%, at least at or about 95%, at least at or about 96%, at least at or about 97%, at least at or about 98%, or at least at or about 99% sequence identity to SEQ ID NO:15.

[0700] 160. The producer cell of any of embodiments 134-142, wherein the henipavirus envelope attachment glycoprotein G (G protein) or a biologically active portion thereof comprises:

[0701] (i) the sequence set forth in SEQ ID NO: 40;

[0702] (ii) an amino acid sequence having at least at or about 80%, at least at or about 81%, at least at or about 82%, at least at or about 83%, at or about 84%, at least at or about 85%, at least at or about 86%, or at least at or about 87%, at least at or about 88%, or at least at or about 89%, at least at or about 90%, at least at or about 91%, at least at or about 92%, at least at or about 93%, at least at or about 94%, at least at or about 95%, at least at or about 96%, at least at or about 97%, at least at or about 98%, or at least at or about 99% sequence identity to SEQ ID NO:40.

[0703] 161. The producer cell of any of embodiments 134-142, wherein the henipavirus envelope attachment glycoprotein G (G protein) or a biologically active portion thereof comprises:

[0704] (i) the sequence set forth in SEQ ID NO: 50;

[0705] (ii) an amino acid sequence having at least at or about 80%, at least at or about 81%, at least at or about 82%, at least at or about 83%, at or about 84%, at least at or about 85%, at least at or about 86%, or at least at or about 87%, at least at or about 88%, or at least at or about 89%, at least at or about 90%, at least at or about 91%, at least at or about 92%, at least at or about 93%, at least at or about 94%, at least at or about 95%, at least at or about 96%, at least at or about 97%, at least at or about 98%, or at least at or about 99% sequence identity to SEQ ID NO:50.

[0706] 162. The producer cell of any of embodiments 134-142, wherein the henipavirus envelope attachment glycoprotein G (G protein) or a biologically active portion thereof comprises:

[0707] (i) the sequence set forth in SEQ ID NO: 16;

[0708] (ii) an amino acid sequence having at least at or about 80%, at least at or about 81%, at least at or about 82%, at least at or about 83%, at or about 84%, at least at or about 85%, at least at or about 86%, or at least at or about 87%, at least at or about 88%, or at least at or about 89%, at or about 90%, at least at or about 91%, at least at or about 92%, at least at or about 93%, at least at or about 94%, at least at or about 95%, at least at or about 96%, at least at or about 97%, at least at or about 98%, or at least at or about 99% sequence identity to SEQ ID NO:16.

[0709] 163. The producer cell of any of embodiments 134-142, wherein the henipavirus envelope attachment glycoprotein G (G protein) or a biologically active portion thereof comprises:

[0710] (i) the sequence set forth in SEQ ID NO: 51;

[0711] (ii) an amino acid sequence having at least at or about 80%, at least at or about 81%, at least at or about 82%, at least at or about 83%, at or about 84%, at least at or about 85%, at least at or about 86%, or at least at or about 87%, at least at or about 88%, or at least at or about 89%, at or about 90%, at least at or about 91%, at least at or about 92%, at least at or about 93%, at least at or about 94%, at least at or about 95%, at least at or about 96%, at least at or about 97%, at least at or about 98%, or at least at or about 99% sequence identity to SEQ ID NO:51.

[0712] 164. A viral vector particle or viral-like particle produced from the producer cell of any of embodiments 134-163.

[0713] 165. A composition comprising a plurality of targeted lipid particles of any of embodiments 1-81 and 173-176.

[0714] 166. The composition of embodiment 165 further comprising a pharmaceutically acceptable carrier.

[0715] 167. The pharmaceutical composition of embodiment 165 or embodiment 166, wherein the targeted lipid particles comprise an average diameter of less than 1 μm.

[0716] 168. A method of delivering an exogenous agent to a subject (e.g., a human subject), the method comprising administering to the subject the targeted lipid particle of any of embodiments 1-81 and 173-176 or the composition of any of embodiments 165-167 and 177.

[0717] 169. A method of treating a disease or disorder in a subject (e.g., a human subject), the method comprising administering to the subject a targeted lipid particle of any of embodiments 1-81 and 173-176 or the composition of any of embodiments 165-167 and 177.

[0718] 170. A method of fusing a mammalian cell to a targeted lipid particle, the method comprising administering to the subject a targeted lipid particle of any of embodiments 1-81 and 173-176 or the composition of any of embodiments 165-167 and 177.

[0719] 171. The method of embodiment 170, wherein the fusing of the mammalian cell to the targeted lipid particle delivers an exogenous agent to a subject (e.g., a human subject).

[0720] 172. The method of embodiment 170 or embodiment 171, wherein the fusing of the mammalian cell to the targeted lipid particle treats a disease or disorder in a subject (e.g., a human subject).

[0721] 173. The targeted lipid particle of any of embodiments 1-81, wherein the targeted lipid particle has greater expression of the targeted envelope protein compared to a reference lipid particle that has incorporated into a similar lipid bilayer the same envelope protein but that is fused to an alternative targeting moiety, optionally wherein the alternative targeting moiety is a single chain variable fragment (scFv).

[0722] 174. The targeted lipid particle of embodiment 173, wherein the expression is increased by at or greater than 5%, 10%, 20%, 30%, 40%, 50%, 60%, 70%, 80%, 90%, 100%, 125%, 150%, 200%, 300%, 400%, 500% or more.

[0723] 175. The targeted lipid particle of embodiment 173, wherein the expression is increased by at or greater than 1.5-fold, 2-fold, 3-fold, 4-fold, 5-fold, 6-fold, 7-fold, 8-fold, 9-fold, 10-fold, 15-fold, 20-fold, 30-fold or more, preferably at or about or greater than 10-fold or more.

[0724] 176. The targeted lipid particle of any of embodiments 1-81 and 173-175 or the viral vector particle or viral-like particle of embodiment 164, wherein the titer in target cells following transduction is at or greater than 1×10⁶ transduction units (TU)/mL, at or greater than 2×10⁶ TU/mL, at or greater than 3×10⁶ TU/mL, at or greater than 4×10⁶ TU/mL, at or greater than 5×10⁶ TU/mL, at or greater than 6×10⁶ TU/mL, at or greater than 7×10⁶ TU/mL, at or greater than 8×10⁶ TU/mL, at or greater than 9×10⁶ TU/mL, or at or greater than 1×10⁷ TU/mL.

[0725] 177. The composition of any of embodiments 165-167, wherein among the population of lipid particles in the composition, greater than at or about 50%, greater than at or about 55%, greater than at or about 60%, greater than at or about 65%, greater than at or about 70%, or greater than at or about 75% are surface positive for the targeted envelope protein.

[0726] 178. The targeted lipid particle of any of embodiments 1-81 and 173-176, wherein the targeted envelope protein is present on the surface of the targeted lipid particle at a density of at least about (0.001, 0.002, 0.005, 0.01, 0.02, 0.05, 0.1, 0.2 or 0.5) targeted envelope proteins/nm².

[0727] 179. A composition comprising a plurality of the targeted lipid particles of any of embodiments 1-81, 173-176 and 178, wherein the targeted envelope protein is present on the surface of the targeted lipid particles at an average density of at least about (0.001, 0.002, 0.005, 0.01, 0.02, 0.05, 0.1, 0.2 or 0.5) targeted envelope proteins/nm².

[0728] 180. The producer cell of any one of embodiments 134-163, wherein the producer cell has greater membrane (e.g., plasma membrane) expression of the targeted envelope protein compared to a reference producer cell that has incorporated into its membrane (e.g. plasma membrane) the same envelope protein but that is fused to an alternative targeting moiety, optionally wherein the alternative targeting moiety is a single chain variable fragment (scFv).

[0729] 181. The producer cell of embodiment 180, wherein the expression is increased by at or greater than 5%, 10%, 20%, 30%, 40%, 50%, 60%, 70%, 80%, 90%, 100%, 125%, 150%, 200%, 300%, 400%, 500% or more.

[0730] 182. The producer cell of embodiment 180, wherein the expression is increased by at or greater than 1.5-fold, 2-fold, 3-fold, 4-fold, 5-fold, 6-fold, 7-fold, 8-fold, 9-fold, 10-fold, 15-fold, 20-fold, 30-fold or more, preferably at or about or greater than 10-fold or more.

[0731] 183. The producer cell of any one of embodiments 134-163 and 180-182, wherein the producer cell has the expression of the targeted envelope protein on a membrane (e.g., plasma membrane) of the producer cell is at least 20 proteins (e.g., at least 50, 100, 200, 500, 1000, 2000, 5000, or 10,000 proteins) per square micron.

[0732] 184. The producer cell of any one of embodiments 134-163 and 180-183, wherein the targeted envelope protein comprises at least 0.1% (e.g., at least 0.2%, 0.5%, 1%, 2%, 3%, 4%, 5%, 6%, 7%, 8%, 9%, or 10%) of the total membrane (e.g., plasma membrane) proteins of the producer cell (e.g., by total protein weight).

### EXAMPLES

[0733] The following examples are included for illustrative purposes only and are not intended to limit the scope of the invention.

### Example 1: Generation and Characterization of Producer Cells Containing Targeted Binders

[0734] This Example describes generation and assessment of NiVG targeted binding sequences in which NiVG was linked to scFv or VHH binding modalities.

### A. Binding Modalities Directed to CD4.

[0735] Exemplary retargeted NivG fusogen constructs were generated containing an scFv or VHH binding modality against human cellular receptor CD4. For each binding modality, four different sequences that contained a unique CDR3 were assessed. Each exemplary binder sequence was codon optimized and cloned into an expression vector as a fusion with a sequence encoding NiVG (GcΔ34; Bender et al. 2016 PLoS Pathol 12(6):e1005641). The resulting vectors encoded a NivG targeting domain containing NiVG (SEQ ID NO:16) a flexible linker and the binding domain, followed by a 6xHis-tag for detection (NivG-linker-scFv-6xHis).

[0736] After subcloning, 5 μg of each exemplary construct was transfected into HEK 293 cells using a transfection reagent. A pcDNA3.1 plasmid (empty vector) and the expression vector without the binder domain (NiVG-linker-NoBinder) were used as negative controls.

[0737] At 48 hours post-transfection, cells were harvested and 100,000 cells were incubated for 1 hour at 4° C. with either 50 nM or 300 nM of soluble human CD4 protein with a human Fc tag (hCD4-Fc). After incubation, cells were washed and co-stained with an anti-His antibody conjugated to Alexa-647 to detect surface expression of NivG-binders and an anti-human Fc antibody conjugated to Alexa-488 to detect binding to soluble hCD4-Fc protein.

[0738] Cells were analyzed by flow cytometry, and gates for His (surface expression) and Fc (CD4-protein binding) were set based on the negative control empty vector (pcDNA3.1). Evaluation of median fluorescence intensity (MFI) of cells transfected with constructs containing VHH binding modalities demonstrated higher surface expression as quantified by % of His+ cells (FIG. 1A) and higher binding to soluble hCD4-Fc protein as quantified by % Fc+ cell (FIG. 1B), than cells transfected with constructs containing scFv binding modalities.

### B. Binding Modalities Directed to Multiple Cellular Receptors

[0739] Exemplary constructs were generated containing scFv and VHH binding modalities generally as described above, but containing unique sequences directed against other cellular receptors hCD8, CD4, ASGR2, TM4SF5, LDLR or ASGR1. Multiple sequences, each containing a unique CDR3, were assessed for each binding modality containing distinct cellular receptors. After subcloning into the NivG-linker-6xHis expression vector as described above, 5 μg of each exemplary construct was transfected into about HEK 293 cells. The pcDNA3.1 plasmid (empty vector) and the expression vector without the binding domain (NiVG-linker-NoBinder) were used as negative controls.

[0740] At 48 hours post-transfection, cells were harvested and 100,000 cells were washed and stained with an anti-His antibody conjugated to Alexa-647 to detect surface expression of NivG-binders. Cells were analyzed by flow cytometry, and gates for His (surface expression) were set based on the negative control empty vector (pcDNA3.1). Median fluorescence intensity (MFI) was normalized to that of the NivG-NoBinder control set to 100. Cells transfected with constructs containing VHH binding modalities, compared to the scFv binding modalities, demonstrated higher surface expression of targeted binding sequences on 293 cells as quantified by % of His+ cells (FIG. 1C).

### Example 2: Generation and Characterization of Lentiviruses Pseudotyped with Targeted Binders

[0741] This Example describes generation of lentiviruses pseudotyped with NivG retargeted fusogens and assessment of transduction of primary human T cells.

### A. Generation of NivG Pseudotyped Lentiviruses.

[0742] 293 cells were plated at 5.4×10⁶ into 10 cm dishes and allowed to rest for 24 hours. At 24 hours after plating, cells were transfected using polyethylenimine (PEI) with the following plasmids: NivG pseudotyped vector containing hCD4 targeted binding sequences linked to scFv or VHH binding modalities (NivG-linker-hCD4-binding modality), vector containing a nucleotide sequence encoding the NivF sequence NivFde122 (SEQ ID NO:8; or SEQ ID NO:23 without a signal sequence; Bender et al. 2016 PLoS), a packaging plasmid containing an empty backbone, an HIV-1 pol, HIV-1 gag, HIV-1 Rev, HIV-1 Tat, an AmpR promoter and an SV40 promoter and a lentiviral reporter plasmid encoding an enhanced green fluorescent protein (eGFP) under the control of a SFFV promoter pLenti-SFFV-eGFP. Positive control cells were generated using the plasmids described above along with 4 μg of VSV-G.

### B. NivG Pseudotyped Lentiviral Transduction Efficiency of Primary Human T Cells.

[0743] PanT cells from peripheral blood (StemCellTech, Vancouver, Canada) that were negatively selected to enrich for T cells were thawed and activated with anti CD3/anti-CD28 for 2 days. Concentrated lentiviruses generated generally as described above were serially diluted 6-fold starting at 0.05 dilution with a total of 4 points in the dilution series. Lentiviruses were added to 100,000 PanT cells and transduced by spinfection for 90 minutes at 1000 g at 25C. Transduced PanT cells were split on days 2 and 5 post-transduction, and on day 7 post-transduction, cells were harvested and stained with an Alexa-647 conjugated anti-human CD4 antibody. Cells were analyzed by flow cytometry, and titer was determined by % of CD4-positive cells that were GFP+. Cells transfected with constructs containing VHH binding modalities demonstrated a 10-fold increased titer over constructs containing scFv binding modalities on primary human T cells (FIG. 2).

### Example 3. In Vivo Delivery of Lentiviruses Pseudotyped with CD8 Targeted Binders

[0744] This Example describes generation of lentiviruses pseudotyped with a CD8 NivG retargeted fusogen and in vivo assessment of transduction of primary human T cells.

[0745] CD8 retargeted NivG fusogens were generated essentially as described in Example 2. The retargeted NivG pseudotyped fusogen contained a NivG targeting domain containing NiVG (SEQ ID NO:16) a flexible linker and an exemplary CD8 binding domain, either a VHH or scFv binding modality.

[0746] T cells from human peripheral blood mononuclear cells (PBMCs) were activated with anti CD3/anti-CD28 for 3 days. After 3 days of incubation, 1×10⁷ cells were injected intraperitoneally into NOD-scid-IL2rγ^{null} mice. One day post-injection, mice received 1×10⁷ transducing units (TU) of CD8 NivG pseudotyped lentiviruses generated as described above, or no lenti-viral vector (LVV) control, through intraperitoneal injection. On day 7 post-CD8 NivG psedudotyped lentivirus injection, peritoneal cells were harvested and analyzed by flow cytometry, and titer was determined by % of CD8 positive or negative cells that were GFP+. The CD8 retargeted pseudotyped lentiviruses demonstrated significant in vivo transduction of CD8+ T cells (FIG. 3A) and minimal transduction of CD8− T cells (FIG. 3B). These results indicate that CD8 targeted pseudotyped lentiviral-mediated delivery permits specific delivery of a transgene to the intended cell type (e.g. CD8+ T cells).

### Example 4. In Vitro Assessment of Chimeric Antigen Receptor (Car) Containing Pseudotyped Lentiviruses with CD8 Targeted Binders

[0747] This Example describes the in vitro tumor killing activity of lentivirus pseudotyped with a CD8 retargeted fusogen and expressing a CD19-directed chimeric antigen receptor (CD19CAR). The lentiviruses were generated substantially as described in Example 3, except that a plasmid encoding either the eGFP or the CD19CAR were transfected into the 293 producer cells. The CD19CAR contained an anti-scFv directed against CD19 and an intracellular signaling domain containing intracellular components of 4-1BB and CD3-zeta.

[0748] Human peripheral blood mononuclear cells (PBMCs) were activated with anti CD3/anti-CD28reagent and were transduced with CD8 retargeted NivG lentiviruses expressing CD19+CAR or GFP at various concentration ranges (10-10,000 transducing units/well). RFP+Nalm6 leukemia cells were added to cultures on day 3, and elimination of Nalm6 cells was evaluated at 18 hours by flow cytometry.

[0749] As shown in FIG. 4A, CD19+CAR expression was detected specifically in CD8+ cells with both CD8 retargeted fusogens at 4 days after transduction. Transduced CD8+ T cells expressing the CD19CAR also mediated a potent and lentivirus dose-dependent increase in killing of CD19+ Nalm6 leukemia cells, while in contrast, cells transduced to express GFP did not exhibit target cell killing (FIG. 4B).

[0750] These results demonstrate that CD8-retargeted pseudotyped lentiviruses with a transgene encoding a CD19CAR deliver CD19CAR to human CD8+ T cells to mediate a specific transduction of CD8+ T cells in a complex mixture of PBMCs and showed a dose-dependent anti-tumor response by killing of leukemic cells in vitro.

[0751] The present invention is not intended to be limited in scope to the particular disclosed embodiments, which are provided, for example, to illustrate various aspects of the invention. Various modifications to the compositions and methods described will become apparent from the description and teachings herein. Such variations may be practiced without departing from the true scope and spirit of the disclosure and are intended to fall within the scope of the present disclosure.

SEQUENCES

| # | SEQUENCE | ANNOTATION |
|---|---|---|
| 1 | MVVILDKRCY CNLLILILMI SECSVGILHY EKLSKIGLVK | Nipah virus |
| | GVTRKYKIKS NPLTKDIVIK MIPNVSNMSQ CTGSVMENYK | NiV-F with |
| | TRLNGILTPI KGALEIYKNN THDLVGDVRL AGVIMAGVAI | signal sequence |
| | GIATAAQITA GVALYEAMKN ADNINKLKSS IESTNEAVVK | (aa 1-546) |
| | LQETAEKTVY VLTALQDYIN TNLVPTIDKI SCKQTELSLD | Uniprot Q9IH63 |
| | LALSKYLSDL LFVFGPNLQD PVSNSMTIQA ISQAFGGNYE | |
| | TLLRTLGYAT EDFDDLLESD SITGQIIYVD LSSYYIIVRV | |
| | YFPILTEIQQ AYIQELLPVS FNNDNSEWIS IVPNFILVRN | |
| | TLISNIEIGF CLITKRSVIC NQDYATPMTN NMRECLTGST | |
| | EKCPRELVVS SHVPRFALSN GVLFANCISV TCQCQTTGRA | |
| | ISQSGEQTLL MIDNTTCPTA VLGNVIISLG KYLGSVNYNS | |
| | EGIAIGPPVF TDKVDISSQI SSMNQSLQQS KDYIKEAQRL | |
| | LDTVNPSLIS MLSMIILYVL SIASLCIGLI TFISFIIVEK | |
| | KRNTYSRLED RRVRPTSSGD LYYIGT | |
| 2 | ILHY EKLSKIGLVK GVTRKYKIKS NPLTKDIVIK MIPNVSNMSQ | Nipah virus |
| | CTGSVMENYK TRLNGILTPI KGALEIYKNN THDLVGDVRL | NiV-F F0 (aa 27- |
| | AGVIMAGVAI GIATAAQITA GVALYEAMKN ADNINKLKSS | 546) |
| | IESTNEAVVK LQETAEKTVY VLTALQDYIN TNLVPTIDKI | |
| | SCKQTELSLD LALSKYLSDL LFVFGPNLQD PVSNSMTIQA | |
| | ISQAFGGNYE TLLRTLGYAT EDFDDLLESD SITGQIIYVD | |
| | LSSYYIIVRV YFPILTEIQQ AYIQELLPVS FNNDNSEWIS | |
| | IVPNFILVRN TLISNIEIGF CLITKRSVIC NQDYATPMTN | |
| | NMRECLTGST EKCPRELVVS SHVPRFALSN GVLFANCISV | |
| | TCQCQTTGRA ISQSGEQTLL MIDNTTCPTA VLGNVIISLG | |
| | KYLGSVNYNS EGIAIGPPVF TDKVDISSQI SSMNQSLQQS | |
| | KDYIKEAQRL LDTVNPSLIS MLSMIILYVL SIASLCIGLI | |
| | TFISFIIVEK KRNTYSRLED RRVRPTSSGD LYYIGT | |
| 3 | ILHYEKLSKIGLVKGVTRKYKIKSNPLIKDIVIKMIPNVSNMSQCTGSVME | Nipah virus |
| | NYKTRLNGILTPIKGALEIYKNNTHDLVGDVR | NiV-F F2 (aa 27- |
| | | 109) |
| 4 | LAGVIMAGVAIGIATAAQITAGVALYEAMKNADNINKLKSSIESTNEAVVK | Nipah virus NiV |
| | LQETAEKTVYVLTALQDYINTNLVPTIDKISCKQTELSLDLALSKYLSDLL | F F1 (aa 110- |
| | FVFGPNLQDPVSNSMTIQAISQAFGGNYETLLRTLGYATEDFDDLLESDSI | 546) |
| | TGQIIYVDLSSYYIIVRVYFPILTEIQQAYIQELLPVSFNNDNSEWISIVP | |
| | NFILVRNTLISNIEIGFCLITKRSVICNQDYATPMTNNMRECLTGSTEKCP | |
| | RELVVSSHVPRFALSNGVLFANCISVTCQCQTTGRAISQSGEQTLLMIDNT | |
| | TCPTAVLGNVIISLGKYLGSVNYNSEGIAIGPPVFTDKVDISSQISSMNQS | |
| | LQQSKDYIKEAQRLLDTVNPSLISMLSMIILYVLSIASLCIGLITFISFII | |
| | VEKKRNTYSRLEDRRVRPTSSGDLYYIGT | |
| 5 | ILHY EKLSKIGLVK GVTRKYKIKS NPLTKDIVIK MIPNVSNMSQ | Nipah virus |
| | CTGSVMENYK TRLNGILTPI KGALEIYKNN THDLVGDVRL | NiV-F F0 T234 |
| | AGVIMAGVAI GIATAAQITA GVALYEAMKN ADNINKLKSS | truncation (aa |
| | IESTNEAVVK LQETAEKTVY VLTALQDYIN TNLVPTIDKI | 525-544) |
| | SCKQTELSLD LALSKYLSDL LFVFGPNLQD PVSNSMTIQA | |
| | ISQAFGGNYE TLLRTLGYAT EDFDDLLESD SITGQIIYVD | |
| | LSSYYIIVRV YFPILTEIQQ AYIQELLPVS FNNDNSEWIS | |
| | IVPNFILVRN TLISNIEIGF CLITKRSVIC NQDYATPMTN | |
| | NMRECLTGST EKCPRELVVS SHVPRFALSN GVLFANCISV | |
| | TCQCQTTGRA ISQSGEQTLL MIDNTTCPTA VLGNVIISLG | |
| | KYLGSVNYNS EGIAIGPPVF TDKVDISSQI SSMNQSLQQS | |
| | KDYIKEAQRL LDTVNPSLIS MLSMIILYVL SIASLCIGLI | |
| | TFISFIIVEK KRNTGT | |
| 6 | LAGVIMAGVAIGIATAAQITAGVALYEAMKNADNINKLKSSIESTNEAVVK | Nipah virus NiV |
| | LQETAEKTVYVLTALQDYINTNLVPTIDKISCKQTELSLDLALSKYLSDLL | F F1 (aa 110- |
| | FVFGPNLQDPVSNSMTIQAISQAFGGNYETLLRTLGYATEDFDDLLESDSI | 546) truncation |
| | TGQIIYVDLSSYYIIVRVYFPILTEIQQAYIQELLPVSFNNDNSEWISIVP | (aa 525-544) |
| | NFILVRNTLISNIEIGFCLITKRSVICNQDYATPMTNNMRECLTGSTEKCP | |
| | RELVVSSHVPRFALSNGVLFANCISVTCQCQTTGRAISQSGEQTLLMIDNT | |
| | TCPTAVLGNVIISLGKYLGSVNYNSEGIAIGPPVFTDKVDISSQISSMNQS | |
| | LQQSKDYIKEAQRLLDTVNPSLISMLSMIILYVLSIASLCIGLITFISFII | |
| | VEKKRNTGT | |
| 7 | ILHY EKLSKIGLVK GVTRKYKIKS NPLTKDIVIK MIPNVSNMSQ | Nipah virus |
| | CTGSVMENYK TRLNGILTPI KGALEIYKNQ THDLVGDVRL | NiV-F F0 T234 |
| | AGVIMAGVAI GIATAAQITA GVALYEAMKN ADNINKLKSS | truncation (aa |
| | IESTNEAVVK LQETAEKTVY VLTALQDYIN TNLVPTIDKI | 525-544) AND |
| | SCKQTELSLD LALSKYLSDL LFVFGPNLQD PVSNSMTIQA | mutation on N- |
| | ISQAFGGNYE TLLRTLGYAT EDFDDLLESD SITGQIIYVD | linked |
| | LSSYYIIVRV YFPILTEIQQ AYIQELLPVS FNNDNSEWIS | glycosylation |
| | IVPNFILVRN TLISNIEIGF CLITKRSVIC NQDYATPMTN | site |
| | NMRECLTGST EKCPRELVVS SHVPRFALSN GVLFANCISV | |
| | TCQCQTTGRA ISQSGEQTLL MIDNTTCPTA VLGNVIISLG | |
| | KYLGSVNYNS EGIAIGPPVF TDKVDISSQI SSMNQSLQQS | |
| | KDYIKEAQRL LDTVNPSLIS MLSMIILYVL SIASLCIGLI | |
| | TFISFIIVEK KRNTGT | |
| 8 | MVVILDKRCY CNLLILILMI SECSVGILHY EKLSKIGLVK | Truncated NiV |
| | GVTRKYKIKS NPLTKDIVIK MIPNVSNMSQ CTGSVMENYK | fusion |
| | TRLNGILTPI KGALEIYKNN THDLVGDVRL AGVIMAGVAI | glycoprotein |
| | GIATAAQITA GVALYEAMKN ADNINKLKSS IESTNEAVVK | (FcDelta22) at |
| | LQETAEKTVY VLTALQDYIN TNLVPTIDKI SCKQTELSLD | cytoplasmic tail |
| | LALSKYLSDL LFVFGPNLQD PVSNSMTIQA ISQAFGGNYE | (with signal |
| | TLLRTLGYAT EDFDDLLESD SITGQIIYVD LSSYYIIVRV | sequence) |
| | YFPILTEIQQ AYIQELLPVS FNNDNSEWIS IVPNFILVRN | |
| | TLISNIEIGF CLITKRSVIC NQDYATPMTN NMRECLTGST | |
| | EKCPRELVVS SHVPRFALSN GVLFANCISV TCQCQTTGRA | |
| | ISQSGEQTLL MIDNTTCPTA VLGNVIISLG KYLGSVNYNS | |
| | EGIAIGPPVF TDKVDISSQI SSMNQSLQQS KDYIKEAQRL | |
| | LDTVNPSLIS MLSMIILYVL SIASLCIGLI TFISFIIVEK KRNT | |
| 9 | MGPAENKKVR FENTTSDKGK IPSKVIKSYY GTMDIKKINE | NiVG protein |
| | GLLDSKILSA FNTVIALLGS IVIIVMNIMI IQNYTRSTDN | attachment |
| | QAVIKDALQG IQQQIKGLAD KIGTEIGPKV SLIDTSSTIT | glycoprotein |
| | IPANIGLLGS KISQSTASIN ENVNEKCKFT LPPLKIHECN | (602 aa) |
| | ISCPNPLPFR EYRPQTEGVS NLVGLPNNIC LQKTSNQILK | |
| | PKLISYTLPV VGQSGTCITD PLLAMDEGYF AYSHLERIGS | |
| | CSRGVSKQRI IGVGEVLDRG DEVPSLFMTN VWTPPNPNTV | |
| | YHCSAVYNNE FYYVLCAVST VGDPILNSTY WSGSLMMTRL | |
| | AVKPKSNGGG YNQHQLALRS IEKGRYDKVM PYGPSGIKQG | |
| | DTLYFPAVGF LVRTEFKYND SNCPITKCQY SKPENCRLSM | |
| | GIRPNSHYIL RSGLLKYNLS DGENPKVVFI EISDQRLSIG | |
| | SPSKIYDSLG QPVFYQASFS WDTMIKFGDV LTVNPLVVNW | |
| | RNNTVISRPG QSQCPRFNTC PEICWEGVYN DAFLIDRINW | |
| | ISAGVFLDSN QTAENPVFTV FKDNEILYRA QLASEDTNAQ | |
| | KTITNCFLLK NKIWCISLVE IYDTGDNVIR PKLFAVKIPE QC | |
| 10 | MGKVR FENTTSDKGK IPSKVIKSYY GTMDIKKINE GLLDSKILSA | NiVG protein |
| | FNTVIALLGS IVIIVMNIMI IQNYTRSTDN QAVIKDALQG | attachment |
| | IQQQIKGLAD KIGTEIGPKV SLIDTSSTIT IPANIGLLGS | glycoprotein |
| | KISQSTASIN ENVNEKCKFT LPPLKIHECN ISCPNPLPFR | Truncated Δ5 |
| | EYRPQTEGVS NLVGLPNNIC LQKTSNQILK PKLISYTLPV | |
| | VGQSGTCITD PLLAMDEGYF AYSHLERIGS CSRGVSKQRI | |
| | IGVGEVLDRG DEVPSLFMTN VWTPPNPNTV YHCSAVYNNE | |
| | FYYVLCAVST VGDPILNSTY WSGSLMMTRL AVKPKSNGGG | |
| | YNQHQLALRS IEKGRYDKVM PYGPSGIKQG DTLYFPAVGF | |
| | LVRTEFKYND SNCPITKCQY SKPENCRLSM GIRPNSHYIL | |
| | RSGLLKYNLS DGENPKVVFI EISDQRLSIG SPSKIYDSLG | |
| | QPVFYQASFS WDTMIKFGDV LTVNPLVVNW RNNTVISRPG | |
| | QSQCPRFNTC PEICWEGVYN DAFLIDRINW ISAGVFLDSN | |
| | QTAENPVFTV FKDNEILYRA QLASEDTNAQ KTITNCFLLK | |
| | NKIWCISLVE IYDTGDNVIR PKLFAVKIPE QC | |
| 11 | MGNTTSDKGK IPSKVIKSYY GTMDIKKINE GLLDSKILSA | NiVG protein |
| | FNTVIALLGS IVIIVMNIMI IQNYTRSTDN QAVIKDALQG | attachment |
| | IQQQIKGLAD KIGTEIGPKV SLIDTSSTIT IPANIGLLGS | glycoprotein |
| | KISQSTASIN ENVNEKCKFT LPPLKIHECN ISCPNPLPFR | Truncated Δ10 |
| | EYRPQTEGVS NLVGLPNNIC LQKTSNQILK PKLISYTLPV | |
| | VGQSGTCITD PLLAMDEGYF AYSHLERIGS CSRGVSKQRI | |
| | IGVGEVLDRG DEVPSLFMTN VWTPPNPNTV YHCSAVYNNE | |
| | FYYVLCAVST VGDPILNSTY WSGSLMMTRL AVKPKSNGGG | |
| | YNQHQLALRS IEKGRYDKVM PYGPSGIKQG DTLYFPAVGF | |
| | LVRTEFKYND SNCPITKCQY SKPENCRLSM GIRPNSHYIL | |
| | RSGLLKYNLS DGENPKVVFI EISDQRLSIG SPSKIYDSLG | |
| | QPVFYQASFS WDTMIKFGDV LTVNPLVVNW RNNTVISRPG | |
| | QSQCPRFNTC PEICWEGVYN DAFLIDRINW ISAGVFLDSN | |
| | QTAENPVFTV FKDNEILYRA QLASEDTNAQ KTITNCFLLK | |
| | NKIWCISLVE IYDTGDNVIR PKLFAVKIPE QC | |
| 12 | MGKGK IPSKVIKSYY GTMDIKKINE GLLDSKILSA FNTVIALLGS | NiVG protein |
| | IVIIVMNIMI IQNYTRSTDN QAVIKDALQG IQQQIKGLAD | attachment |
| | KIGTEIGPKV SLIDTSSTIT IPANIGLLGS KISQSTASIN | glycoprotein |
| | ENVNEKCKFT LPPLKIHECN ISCPNPLPFR EYRPQTEGVS | Truncated Δ15 |
| | NLVGLPNNIC LQKTSNQILK PKLISYTLPV VGQSGTCITD | |
| | PLLAMDEGYF AYSHLERIGS CSRGVSKQRI IGVGEVLDRG | |
| | DEVPSLFMTN VWTPPNPNTV YHCSAVYNNE FYYVLCAVST | |
| | VGDPILNSTY WSGSLMMTRL AVKPKSNGGG YNQHQLALRS | |
| | IEKGRYDKVM PYGPSGIKQG DTLYFPAVGF LVRTEFKYND | |
| | SNCPITKCQY SKPENCRLSM GIRPNSHYIL RSGLLKYNLS | |
| | DGENPKVVFI EISDQRLSIG SPSKIYDSLG QPVFYQASFS | |
| | WDTMIKFGDV LTVNPLVVNW RNNTVISRPG QSQCPRFNTC | |
| | PEICWEGVYN DAFLIDRINW ISAGVFLDSN QTAENPVFTV | |
| | FKDNEILYRA QLASEDTNAQ KTITNCFLLK NKIWCISLVE | |
| | IYDTGDNVIR PKLFAVKIPE QC | |
| 13 | MGSKVIKSYY GTMDIKKINE GLLDSKILSA FNTVIALLGS | NiVG protein |
| | IVIIVMNIMI IQNYTRSTDN QAVIKDALQG IQQQIKGLAD | attachment |
| | KIGTEIGPKV SLIDTSSTIT IPANIGLLGS KISQSTASIN | glycoprotein |
| | ENVNEKCKFT LPPLKIHECN ISCPNPLPFR EYRPQTEGVS | Truncated Δ20 |
| | NLVGLPNNIC LQKTSNQILK PKLISYTLPV VGQSGTCITD | |
| | PLLAMDEGYF AYSHLERIGS CSRGVSKQRI IGVGEVLDRG | |
| | DEVPSLFMTN VWTPPNPNTV YHCSAVYNNE FYYVLCAVST | |
| | VGDPILNSTY WSGSLMMTRL AVKPKSNGGG YNQHQLALRS | |
| | IEKGRYDKVM PYGPSGIKQG DTLYFPAVGF LVRTEFKYND | |
| | SNCPITKCQY SKPENCRLSM GIRPNSHYIL RSGLLKYNLS | |
| | DGENPKVVFI EISDQRLSIG SPSKIYDSLG QPVFYQASFS | |
| | WDTMIKFGDV LTVNPLVVNW RNNTVISRPG QSQCPRFNTC | |
| | PEICWEGVYN DAFLIDRINW ISAGVFLDSN QTAENPVFTV | |
| | FKDNEILYRA QLASEDTNAQ KTITNCFLLK NKIWCISLVE | |
| | IYDTGDNVIR PKLFAVKIPE QC | |
| 14 | MGSYY GTMDIKKINE GLLDSKILSA FNTVIALLGS IVIIVMNIMI | NiVG protein |
| | IQNYTRSTDN QAVIKDALQG IQQQIKGLAD KIGTEIGPKV | attachment |
| | SLIDTSSTIT IPANIGLLGS KISQSTASIN ENVNEKCKFT | glycoprotein |
| | LPPLKIHECN ISCPNPLPFR EYRPQTEGVS NLVGLPNNIC | Truncated Δ25 |
| | LQKTSNQILK PKLISYTLPV VGQSGTCITD PLLAMDEGYF | |
| | AYSHLERIGS CSRGVSKQRI IGVGEVLDRG DEVPSLFMTN | |
| | VWTPPNPNTV YHCSAVYNNE FYYVLCAVST VGDPILNSTY | |
| | WSGSLMMTRL AVKPKSNGGG YNQHQLALRS IEKGRYDKVM | |
| | PYGPSGIKQG DTLYFPAVGF LVRTEFKYND SNCPITKCQY | |
| | SKPENCRLSM GIRPNSHYIL RSGLLKYNLS DGENPKVVFI | |
| | EISDQRLSIG SPSKIYDSLG QPVFYQASFS WDTMIKFGDV | |
| | LTVNPLVVNW RNNTVISRPG QSQCPRFNTC PEICWEGVYN | |
| | DAFLIDRINW ISAGVFLDSN QTAENPVFTV FKDNEILYRA | |
| | QLASEDTNAQ KTITNCFLLK NKIWCISLVE IYDTGDNVIR | |
| | PKLFAVKIPE QC | |
| 15 | MGTMDIKKINE GLLDSKILSA FNTVIALLGS IVIIVMNIMI | NiVG protein |
| | IQNYTRSTDN QAVIKDALQG IQQQIKGLAD KIGTEIGPKV | attachment |
| | SLIDTSSTIT IPANIGLLGS KISQSTASIN ENVNEKCKFT | glycoprotein |
| | LPPLKIHECN ISCPNPLPFR EYRPQTEGVS NLVGLPNNIC | Truncated Δ30 |
| | LQKTSNQILK PKLISYTLPV VGQSGTCITD PLLAMDEGYF | |
| | AYSHLERIGS CSRGVSKQRI IGVGEVLDRG DEVPSLFMTN | |
| | VWTPPNPNTV YHCSAVYNNE FYYVLCAVST VGDPILNSTY | |
| | WSGSLMMTRL AVKPKSNGGG YNQHQLALRS IEKGRYDKVM | |
| | PYGPSGIKQG DTLYFPAVGF LVRTEFKYND SNCPITKCQY | |
| | SKPENCRLSM GIRPNSHYIL RSGLLKYNLS DGENPKVVFI | |
| | EISDQRLSIG SPSKIYDSLG QPVFYQASFS WDTMIKFGDV | |
| | LTVNPLVVNW RNNTVISRPG QSQCPRFNTC PEICWEGVYN | |
| | DAFLIDRINW ISAGVFLDSN QTAENPVFTV FKDNEILYRA | |
| | QLASEDTNAQ KTITNCFLLK NKIWCISLVE IYDTGDNVIR | |
| | PKLFAVKIPE QC | |
| 16 | MKKINEGLLDSKILSA FNTVIALLGS IVIIVMNIMI IQNYTRSTDN | NiVG protein |
| | QAVIKDALQG IQQQIKGLAD KIGTEIGPKV SLIDTSSTIT | attachment |
| | IPANIGLLGS KISQSTASIN ENVNEKCKFT LPPLKIHECN | glycoprotein |
| | ISCPNPLPFR EYRPQTEGVS NLVGLPNNIC LQKTSNQILK | Truncated and |
| | PKLISYTLPV VGQSGTCITD PLLAMDEGYF AYSHLERIGS | mutated |
| | CSRGVSKQRI IGVGEVLDRG DEVPSLFMTN VWTPPNPNTV | (E501 A, |
| | YHCSAVYNNE FYYVLCAVST VGDPILNSTY WSGSLMMTRL | W504A, Q530A, |
| | AVKPKSNGGG YNQHQLALRS IEKGRYDKVM PYGPSGIKQG | E533A) NiV G |
| | DTLYFPAVGF LVRTEFKYND SNCPITKCQY SKPENCRLSM | protein (Gc Δ |
| | GIRPNSHYIL RSGLLKYNLS DGENPKVVFI EISDQRLSIG | 34) |
| | SPSKIYDSLG QPVFYQASFS WDTMIKFGDV LTVNPLVVNW | |
| | RNNTVISRPG QSQCPRFNTC PAICAEGVYN DAFLIDRINW | |
| | ISAGVFLDSN ATAANPVFTV FKDNEILYRA QLASEDTNAQ | |
| | KTITNCFLLK NKIWCISLVE IYDTGDNVIR PKLFAVKIPE QCT | |
| 17 | MATQEVRLKC LLCGIIVLVL SLEGLGILHY EKLSKIGLVK | Hendra virus F |
| | GITRKYKIKS | protein |
| | NPLTKDIVIK MIPNVSNVSK CTGTVMENYK SRLTGILSPI | Uniprot O89342 |
| | KGAIELYNNN | (with signal |
| | THDLVGDVKL AGVVMAGIAI GIATAAQITA GVALYEAMKN | sequence) |
| | ADNINKLKSS | |
| | IESTNEAVVK LQETAEKTVY VLTALQDYIN TNLVPTIDQI | |
| | SCKQTELALD | |
| | LALSKYLSDL LFVFGPNLQD PVSNSMTIQA ISQAFGGNYE | |
| | TLLRTLGYAT EDFDDLLESD SIAGQIVYVD LSSYYIIVRV | |
| | YFPILTEIQQ AYVQELLPVS | |
| | FNNDNSEWIS IVPNFVLIRN TLISNIEVKY CLITKKSVIC | |
| | NQDYATPMTA | |
| | SVRECLTGST DKCPRELVVS SHVPRFALSG GVLFANCISV | |
| | TCQCQTTGRA ISQSGEQTLL MIDNTTCTTV VLGNIIISLG | |
| | KYLGSINYNS ESIAVGPPVY | |
| | TDKVDISSQI SSMNQSLQQS KDYIKEAQKI LDTVNPSLIS | |
| | MLSMIILYVL | |
| | SIAALCIGLI TFISFVIVEK KRGNYSRLDD RQVRPVSNGD LYYIGT | |
| 18 | MMADSKLVSL NNNLSGKIKD QGKVIKNYYG TMDIKKINDG | Hendra virus G |
| | LLDSKILGAF | protein Uniprot |
| | NTVIALLGSI IIIVMNIMII QNYTRTTDNQ ALIKESLQSV | O89343 |
| | QQQIKALTDK IGTEIGPKVS LIDTSSTITI PANIGLLGSK | |
| | ISQSTSSINE NVNDKCKFTL | |
| | PPLKIHECNI SCPNPLPFRE YRPISQGVSD LVGLPNQICL | |
| | QKTTSTILKP RLISYTLPIN TREGVCITDP LLAVDNGFFA | |
| | YSHLEKIGSC TRGIAKQRII GVGEVLDRGD KVPSMFMTNV | |
| | WTPPNPSTIH HCSSTYHEDF YYTLCAVSHV | |
| | GDPILNSTSW TESLSLIRLA VRPKSDSGDY NQKYIAITKV | |
| | ERGKYDKVMP | |
| | YGPSGIKQGD TLYFPAVGFL PRTEFQYNDS NCPIIHCKYS | |
| | KAENCRLSMG | |
| | VNSKSHYILR SGLLKYNLSL GGDIILQFIE IADNRLTIGS | |
| | PSKIYNSLGQ PVFYQASYSW DTMIKLGDVD TVDPLRVQWR | |
| | NNSVISRPGQ SQCPRFNVCP | |
| | EVCWEGTYND AFLIDRLNWV SAGVYLNSNQ TAENPVFAVF | |
| | KDNEILYQVP LAEDDTNAQK TITDCFLLEN VIWCISLVEI | |
| | YDTGDSVIRP KLFAVKIPAQ CSES | |
| 19 | MVVILDKRCY CNLLILILMI SECSVGILHY EKLSKIGLVK | Nipah virus |
| | GVTRKYKIKS NPLTKDIVIK MIPNVSNMSQ CTGSVMENYK | NiV-F F0 T234 |
| | TRLNGILTPI KGALEIYKNN THDLVGDVRL AGVIMAGVAI | truncation (aa |
| | GIATAAQITA GVALYEAMKN ADNINKLKSS IESTNEAVVK | 525-544)(with |
| | LQETAEKTVY VLTALQDYIN TNLVPTIDKI SCKQTELSLD | signal sequence) |
| | LALSKYLSDL LFVFGPNLQD PVSNSMTIQA ISQAFGGNYE | |
| | TLLRTLGYAT EDFDDLLESD SITGQIIYVD LSSYYIIVRV | |
| | YFPILTEIQQ AYIQELLPVS FNNDNSEWIS IVPNFILVRN | |
| | TLISNIEIGF CLITKRSVIC NQDYATPMTN NMRECLTGST | |
| | EKCPRELVVS SHVPRFALSN GVLFANCISV TCQCQTTGRA | |
| | ISQSGEQTLL MIDNTTCPTA VLGNVIISLG KYLGSVNYNS | |
| | EGIAIGPPVF TDKVDISSQI SSMNQSLQQS KDYIKEAQRL | |
| | LDTVNPSLIS MLSMIILYVL SIASLCIGLI TFISFIIVEK KRNTGT | |
| 20 | MVVILDKRCY CNLLILILMI SECSVGILHY EKLSKIGLVK | Nipah virus |
| | GVTRKYKIKS NPLTKDIVIK MIPNVSNMSQ CTGSVMENYK | NiV-F F0 T234 |
| | TRLNGILTPI KGALEIYKNQ THDLVGDVRL AGVIMAGVAI | truncation (aa |
| | GIATAAQITA GVALYEAMKN ADNINKLKSS IESTNEAVVK | 525-544) AND |
| | LQETAEKTVY VLTALQDYIN TNLVPTIDKI SCKQTELSLD | mutation on N- |
| | LALSKYLSDL LFVFGPNLQD PVSNSMTIQA ISQAFGGNYE | linked |
| | TLLRTLGYAT EDFDDLLESD SITGQIIYVD LSSYYIIVRV | glycosylation |
| | YFPILTEIQQ AYIQELLPVS FNNDNSEWIS IVPNFILVRN | site (with signal |
| | TLISNIEIGF CLITKRSVIC NQDYATPMTN NMRECLTGST | sequence) |
| | EKCPRELVVS SHVPRFALSN GVLFANCISV TCQCQTTGRA | |
| | ISQSGEQTLL MIDNTTCPTA VLGNVIISLG KYLGSVNYNS | |
| | EGIAIGPPVF TDKVDISSQI SSMNQSLQQS KDYIKEAQRL | |
| | LDTVNPSLIS MLSMIILYVL SIASLCIGLI TFISFIIVEK KRNTGT | |
| 21 | MVVILDKRCY CNLLILILMI SECSVGILHY EKLSKIGLVK | Truncated NiV |
| | GVTRKYKIKS NPLTKDIVIK MIPNVSNMSQ CTGSVMENYK | fusion |
| | TRLNGILTPI KGALEIYKNN THDLVGDVRL AGVIMAGVAI | glycoprotein |
| | GIATAAQITA GVALYEAMKN ADNINKLKSS IESTNEAVVK | (FcDelta22) at |
| | LQETAEKTVY VLTALQDYIN TNLVPTIDKI SCKQTELSLD | cytoplasmic tail |
| | LALSKYLSDL LFVFGPNLQD PVSNSMTIQA ISQAFGGNYE | (with signal |
| | TLLRTLGYAT EDFDDLLESD SITGQIIYVD LSSYYIIVRV | sequence) |
| | YFPILTEIQQ AYIQELLPVS FNNDNSEWIS IVPNFILVRN | |
| | TLISNIEIGF CLITKRSVIC NQDYATPMTN NMRECLTGST | |
| | EKCPRELVVS SHVPRFALSN GVLFANCISV TCQCQTTGRA | |
| | ISQSGEQTLL MIDNTTCPTA VLGNVIISLG KYLGSVNYNS | |
| | EGIAIGPPVF TDKVDISSQI SSMNQSLQQS KDYIKEAQRL | |
| | LDTVNPSLIS MLSMIILYVL SIASLCIGLI TFISFIIVEK KRNT | |
| 22 | MKKINEGLLDSKILSA FNTVIALLGS IVIIVMNIMI IQNYTRSTDN | NiVG protein |
| | QAVIKDALQG IQQQIKGLAD KIGTEIGPKV SLIDTSSTIT | attachment |
| | IPANIGLLGS KISQSTASIN ENVNEKCKFT LPPLKIHECN | glycoprotein |
| | ISCPNPLPFR EYRPQTEGVS NLVGLPNNIC LQKTSNQILK | Truncated (Gc Δ |
| | PKLISYTLPV VGQSGTCITD PLLAMDEGYF AYSHLERIGS | 34) |
| | CSRGVSKQRI IGVGEVLDRG DEVPSLFMTN VWTPPNPNTV | |
| | YHCSAVYNNE FYYVLCAVST VGDPILNSTY WSGSLMMTRL | |
| | AVKPKSNGGG YNQHQLALRS IEKGRYDKVM PYGPSGIKQG | |
| | DTLYFPAVGF LVRTEFKYND SNCPITKCQY SKPENCRLSM | |
| | GIRPNSHYIL RSGLLKYNLS DGENPKVVFI EISDQRLSIG | |
| | SPSKIYDSLG QPVFYQASFS WDTMIKFGDV LTVNPLVVNW | |
| | RNNTVISRPG QSQCPRFNTC PEICWEGVYN DAFLIDRINW | |
| | ISAGVFLDSN QTAENPVFTV FKDNEILYRA QLASEDTNAQ | |
| | KTITNCFLLK NKIWCISLVE IYDTGDNVIR PKLFAVKIPE QCT | |
| 23 | ILHY EKLSKIGLVK GVTRKYKIKS NPLTKDIVIK MIPNVSNMSQ | Truncated |
| | CTGSVMENYK TRLNGILTPI KGALEIYKNN THDLVGDVRL | mature NiV |
| | AGVIMAGVAI GIATAAQITA GVALYEAMKN ADNINKLKSS | fusion |
| | IESTNEAVVK LQETAEKTVY VLTALQDYIN TNLVPTIDKI | glycoprotein |
| | SCKQTELSLD LALSKYLSDL LFVFGPNLQD PVSNSMTIQA | (FcDelta22) at |
| | ISQAFGGNYE TLLRTLGYAT EDFDDLLESD SITGQIIYVD | cytoplasmic tail |
| | LSSYYIIVRV YFPILTEIQQ AYIQELLPVS FNNDNSEWIS | |
| | IVPNFILVRN TLISNIEIGF CLITKRSVIC NQDYATPMTN | |
| | NMRECLTGST EKCPRELVVS SHVPRFALSN GVLFANCISV | |
| | TCQCQTTGRA ISQSGEQTLL MIDNTTCPTA VLGNVIISLG | |
| | KYLGSVNYNS EGIAIGPPVF TDKVDISSQI SSMNQSLQQS | |
| | KDYIKEAQRL LDTVNPSLIS MLSMIILYVL SIASLCIGLI | |
| | TFISFIIVEK KRNT | |
| 24 | MSNKRTTVLIIISYTLFYLNNAAIVGFDFDKLNKIGVVQGRVLNYKIKGDP | gb: JQ001776: 61 |
| | MTKDLVLKFIPNIVNITECVREPLSRYNETVRRLLLPIHNMLGLYLNNTNA | 29- |
| | KMTGLMIAGVIMGGIAIGIATAAQITAGFALYEAKKNTENIQKLTDSIMKT | 8166\|Organism: |
| | QDSIDKLTDSVGTSILILNKLQTYINNQLVPNLELLSCRQNKIEFDLMLTK | Cedar |
| | YLVDLMTVIGPNINNPVNKDMTIQSLSLLFDGNYDIMMSELGYTPQDFLDL | virus\|Strain |
| | IESKSITGQIIYVDMENLYVVIRTYLPTLIEVPDAQIYEFNKITMSSNGGE | Name: CG1a\|Prot |
| | YLSTIPNFILIRGNYMSNIDVATCYMTKASVICNQDYSLPMSQNLRSCYQG | ein Name: fusion |
| | ETEYCPVEAVIASHSPRFALTNGVIFANCINTICRCQDNGKTITQNINQFV | glycoprotein\|Gen |
| | SMIDNSTCNDVMVDKFTIKVGKYMGRKDINNINIQIGPQIIIDKVDLSNEI | e Symbol: F |
| | NKMNQSLKDSIFYLREAKRILDSVNISLISPSVQLFLIIISVLSFIILLII | (with signal |
| | IVYLYCKSKHSYKYNKFIDDPDYYNDYKRERINGKASKSNNIYYVGD | sequence) |
| 25 | MALNKNMFSSLFLGYLLVYATTVQSSIHYDSLSKVGVIKGLTYNYKIKGSP | gb: NC_025352: 5 |
| | STKLMVVKLIPNIDSVKNCTQKQYDEYKNLVRKALEPVKMAIDTMLNNVKS | 950- |
| | GNNKYRFAGAIMAGVALGVATAATVTAGIALHRSNENAQAIANMKSAIQNT | 8712\|Organism: |
| | NEAVKQLQLANKQTLAVIDTIRGEINNNIIPVINQLSCDTIGLSVGIRLTQ | Mojiang |
| | YYSEIITAFGPALQNPVNTRITIQAISSVFNGNFDELLKIMGYTSGDLYEI | virus\|Strain |
| | LHSELIRGNIIDVDVDAGYIALEIEFPNLTLVPNAVVQELMPISYNIDGDE | Name: Tongguan |
| | WVTLVPRFVLTRTTLLSNIDTSRCTITDSSVICDNDYALPMSHELIGCLQG | 1\|Protein |
| | DISKCAREKVVSSYVPKFALSDGLVYANCLNTICRCMDTDTPISQSLGATV | Name: fusion |
| | SLLDNKRCSVYQVGDVLISVGSYLGDGEYNADNVELGPPIVIDKIDIGNQL | protein\|lGene |
| | AGINQTLQEAEDYIEKSEEFLKGVNPSIITLGSMVVLYIFMILIAIVSVIA | Symbol: F (with |
| | LVLSIKLTVKGNVVRQQFTYTQHVPSMENINYVSH | signal sequence) |
| 26 | MKKKTDNPTISKRGHNHSRGIKSRALLRETDNYSNGLIVENLVRNCHHPSK | gb: NC_025256: 6 |
| | NNLNYTKTQKRDSTIPYRVEERKGHYPKIKHLIDKSYKHIKRGKRRNGHNG | 865- |
| | NIITIILLLILILKTQMSEGAIHYETLSKIGLIKGITREYKVKGTPSSKDI | 8853\|Organism: |
| | VIKLIPNVTGLNKCTNISMENYKEQLDKILIPINNIIELYANSTKSAPGNA | Bat |
| | RFAGVIIAGVALGVAAAAQITAGIALHEARQNAERINLLKDSISATNNAVA | Paramyxovirus |
| | ELQEATGGIVNVITGMQDYINTNLVPQIDKLQCSQIKTALDISLSQYYSEI | Eid_hel/GH- |
| | LTVFGPNLQNPVTTSMSIQAISQSFGGNIDLLLNLLGYTANDLLDLLESKS | M74a/GHA/200 |
| | ITGQITYINLEHYFMVIRVYYPIMTTISNAYVQELIKISFNVDGSEWVSLV | 9\|Strain |
| | PSYILIRNSYLSNIDISECLITKNSVICRHDFAMPMSYTLKECLTGDTEKC | Name: BatPV/Ei |
| | PREAVVTSYVPRFAISGGVIYANCLSTTCQCYQTGKVIAQDGSQTLMMIDN | d_hel/GH- |
| | QTCSIVRIEEILISTGKYLGSQEYNTMHVSVGNPVFTDKLDITSQISNINQ | M74a/GHA/200 |
| | SIEQSKFYLDKSKAILDKINLNLIGSVPISILFIIAILSLILSIITFVIVM | 9\|Protein |
| | IIVRRYNKYTPLINSDPSSRRSTIQDVYIIPNPGEHSIRSAARSIDRDRD | Name: fusion |
| | | protein\|Gene |
| | | Symbol: F (with |
| | | signal sequence) |
| 27 | (GGGGGS)n wherein n is 1 to 6 | Peptide Linker |
| 28 | MPAENKKVRFENTTSDKGKIPSKVIKSYYGTMDIKKINEGLLDSKILSAFN | gb: AF212302\|Or |
| | TVIALLGSIVIIVMNIMIIQNYTRSTDNQAVIKDALQGIQQQIKGLADKIG | ganism: Nipah |
| | TEIGPKVSLIDTSSTITIPANIGLLGSKISQSTASINENVNEKCKFTLPPL | virus\|Strain |
| | KIHECNISCPNPLPFREYRPQTEGVSNLVGLPNNICLQKTSNQILKPKLIS | Name: UNKNO |
| | YTLPVVGQSGTCITDPLLAMDEGYFAYSHLERIGSCSRGVSKQRIIGVGEV | WN- |
| | LDRGDEVPSLFMTNVWTPPNPNTVYHCSAVYNNEFYYVLCAVSTVGDPILN | AF212302\|Protei |
| | STYWSGSLMMTRLAVKPKSNGGGYNQHQLALRSIEKGRYDKVMPYGPSGIK | n |
| | QGDTLYFPAVGFLVRTEFKYNDSNCPITKCQYSKPENCRLSMGIRPNSHYI | Name: attachmen |
| | LRSGLLKYNLSDGENPKVVFIEISDQRLSIGSPSKIYDSLGQPVFYQASFS | t |
| | WDTMIKFGDVLTVNPLVVNWRNNTVISRPGQSQCPRFNTCPEICWEGVYND | glycoprotein\|Gen |
| | AFLIDRINWISAGVFLDSNQTAENPVFTVFKDNEILYRAQLASEDTNAQKT | e Symbol: G |
| | ITNCFLLKNKIWCISLVEIYDTGDNVIRPKLFAVKIPEQCT | (Uniprot |
| | | Q9IH62) |
| 29 | MLSQLQKNYLDNSNQQGDKMNNPDKKLSVNFNPLELDKGQKDLNKSYYVKN | gb: JQ001776: 81 |
| | KNYNVSNLLNESLHDIKFCIYCIFSLLIIITIINIITISIVITRLKVHEEN | 70- |
| | NGMESPNLQSIQDSLSSLTNMINTEITPRIGILVTATSVILSSSINYVGTK | 10275\|Organism: |
| | TNQLVNELKDYITKSCGFKVPELKLHECNISCADPKISKSAMYSTNAYAEL | Cedar |
| | AGPPKIFCKSVSKDPDFRLKQIDYVIPVQQDRSICMNNPLLDISDGFFTYI | virus\|Strain |
| | HYEGINSCKKSDSFKVLLSHGEIVDRGDYRPSLYLLSSHYHPYSMQVINCV | Name: CG1a\|Prot |
| | PVTCNQSSFVFCHISNNTKTLDNSDYSSDEYYITYFNGIDRPKTKKIPINN | ein |
| | MTADNRYIHFTFSGGGGVCLGEEFIIPVTTVINTDVFTHDYCESFNCSVQT | Name: attachmen |
| | GKSLKEICSESLRSPTNSSRYNLNGIMIISQNNMTDFKIQLNGITYNKLSF | t |
| | GSPGRLSKTLGQVLYYQSSMSWDTYLKAGFVEKWKPFTPNWMNNTVISRPN | glycoprotein\|Gen |
| | QGNCPRYHKCPEICYGGTYNDIAPLDLGKDMYVSVILDSDQLAENPEITVF | e Symbol: G |
| | NSTTILYKERVSKDELNTRSTTTSCFLFLDEPWCISVLETNRFNGKSIRPE | |
| | IYSYKIPKYC | |
| 30 | MPQKTVEFINMNSPLERGVSTLSDKKTLNQSKITKQGYFGLGSHSERNWKK | gb: NC_025256: 9 |
| | QKNQNDHYMTVSTMILEILVVLGIMFNLIVLTMVYYQNDNINQRMAELTSN | 117- |
| | ITVLNLNLNQLINKIQREIIPRITLIDTATTITIPSAITYILATLTTRISE | 11015\|Organism: |
| | LLPSINQKCEFKTPTLVLNDCRINCTPPLNPSDGVKMSSLATNLVAHGPSP | Bat |
| | CRNFSSVPTIYYYRIPGLYNRTALDERCILNPRLTISSTKFAYVHSEYDKN | Paramyxovirus |
| | CTRGFKYYELMTFGEILEGPEKEPRMFSRSFYSPTNAVNYHSCTPIVTVNE | Eid_hel/GH- |
| | GYFLCLECTSSDPLYKANLSNSTFHLVILRHNKDEKIVSMPSFNLSTDQEY | M74a/GHA/200 |
| | VQIIPAEGGGTAESGNLYFPCIGRLLHKRVTHPLCKKSNCSRTDDESCLKS | 9\|Strain |
| | YYNQGSPQHQVVNCLIRIRNAQRDNPTWDVITVDLTNTYPGSRSRIFGSFS | Name: BatPV/Ei |
| | KPMLYQSSVSWHTLLQVAEITDLDKYQLDWLDTPYISRPGGSECPFGNYCP | d_hel/GH- |
| | TVCWEGTYNDVYSLTPNNDLFVTVYLKSEQVAENPYFAIFSRDQILKEFPL | M74a/GHA/200 |
| | DAWISSARTTTISCFMFNNEIWCIAALEITRLNDDIIRPIYYSFWLPTDCR | 9\|Protein |
| | TPYPHTGKMTRVPLRSTYNY | Name: glycoprote |
| | | in\|Gene |
| | | Symbol: G |
| 31 | MATNRDNTITSAEVSQEDKVKKYYGVETAEKVADSISGNKVFILMNTLLIL | gb: NC_025352: 8 |
| | TGAIITITLNITNLTAAKSQQNMLKIIQDDVNAKLEMFVNLDQLVKGEIKP | 716- |
| | KVSLINTAVSVSIPGQISNLQTKFLQKYVYLEESITKQCTCNPLSGIFPTS | 11257}Organtsm: |
| | GPTYPPTDKPDDDTTDDDKVDTTIKPIEYPKPDGCNRTGDHFTMEPGANFY | Mojiang |
| | TVPNLGPASSNSDECYTNPSFSIGSSIYMFSQEIRKTDCTAGEILSIQIVL | virus\|Strain |
| | GRIVDKGQQGPQASPLLVWAVPNPKIINSCAVAAGDEMGWVLCSVTLTAAS | Name: Tongguan |
| | GEPIPHMFDGFWLYKLEPDTEVVSYRITGYAYLLDKQYDSVFIGKGGGIQK | 1\|Protein |
| | GNDLYFQMYGLSRNRQSFKALCEHGSCLGTGGGGYQVLCDRAVMSFGSEES | Name: attachmen |
| | LITNAYLKVNDLASGKPVIIGQTFPPSDSYKGSNGRMYTIGDKYGLYLAPS | t |
| | SWNRYLRFGITPDISVRSTTWLKSQDPIMKILSTCTNTDRDMCPEICNTRG | glycoprotein\|Gen |
| | YQDIFPLSEDSEYYTYIGITPNNGGTKNFVAVRDSDGHIASIDILQNYYSI | e Symbol: G |
| | TSATISCFMYKDEIWCIAITEGKKQKDNPQRIYAHSYKIRQMCYNMKSATV | |
| | TVGNAKNITIRRY | |
| 32 | FNTVIALLGS IVIIVMNIMI IQNYTRSTDN QAVIKDALQG | NivG protein |
| | IQQQIKGLAD KIGTEIGPKV SLIDTSSTIT IPANIGLLGS | attachment |
| | KISQSTASIN ENVNEKCKFT LPPLKIHECN ISCPNPLPFR | glycoprotein |
| | EYRPQTEGVS NLVGLPNNIC LQKTSNQILK PKLISYTLPV | Without |
| | VGQSGTCITD PLLAMDEGYF AYSHLERIGS CSRGVSKQRI | cytoplasmic tail |
| | IGVGEVLDRG DEVPSLFMTN VWTPPNPNTV YHCSAVYNNE | Uniprot Q9IH62 |
| | FYYVLCAVST VGDPILNSTY WSGSLMMTRL AVKPKSNGGG | |
| | YNQHQLALRS IEKGRYDKVM PYGPSGIKQG DTLYFPAVGF | |
| | LVRTEFKYND SNCPITKCQY SKPENCRLSM GIRPNSHYIL | |
| | RSGLLKYNLS DGENPKVVFI EISDQRLSIG SPSKIYDSLG | |
| | QPVFYQASFS WDTMIKFGDV LTVNPLVVNW RNNTVISRPG | |
| | QSQCPRFNTC PEICWEGVYN DAFLIDRINW ISAGVFLDSN | |
| | QTAENPVFTV FKDNEILYRA QLASEDTNAQ KTITNCFLLK | |
| | NKIWCISLVE IYDTGDNVIR PKLFAVKIPE QC | |
| 33 | FNTVIALLGSI IIIVMNIMII QNYTRTTDNQ ALIKESLQSV | Hendra virus G |
| | QQQIKALTDK | protein Uniprot |
| | IGTEIGPKVS LIDTSSTITI PANIGLLGSK ISQSTSSINE | O89343 |
| | NVNDKCKFTL | Without |
| | PPLKIHECNI SCPNPLPFRE YRPISQGVSD LVGLPNQICL | cytoplasmic tail |
| | QKTTSTILKP | |
| | RLISYTLPIN TREGVCITDP LLAVDNGFFA YSHLEKIGSC | |
| | TRGIAKQRII | |
| | GVGEVLDRGD KVPSMFMTNV WTPPNPSTIH HCSSTYHEDF | |
| | YYTLCAVSHV | |
| | GDPILNSTSW TESLSLIRLA VRPKSDSGDY NQKYIAITKV | |
| | ERGKYDKVMP | |
| | YGPSGIKQGD TLYFPAVGFL PRTEFQYNDS NCPIIHCKYS | |
| | KAENCRLSMG | |
| | VNSKSHYILR SGLLKYNLSL GGDIILQFIE IADNRLTIGS | |
| | PSKIYNSLGQ | |
| | PVFYQASYSW DTMIKLGDVD TVDPLRVQWR NNSVISRPGQ | |
| | SQCPRFNVCP EVCWEGTYND AFLIDRLNWV SAGVYLNSNQ | |
| | TAENPVFAVF KDNEILYQVP LAEDDTNAQK TITDCFLLEN | |
| | VIWCISLVEI YDTGDSVIRP KLFAVKIPAQ CSES | |
| 34 | MVVILDKRCY CNLLILILMI SECSVG | signal sequence |
| 35 | MKVR FENTTSDKGK IPSKVIKSYY GTMDIKKINE GLLDSKILSA | NiVG protein |
| | FNTVIALLGS IVIIVMNIMI IQNYTRSTDN QAVIKDALQG | attachment |
| | IQQQIKGLAD KIGTEIGPKV SLIDTSSTIT IPANIGLLGS | glycoprotein |
| | KISQSTASIN ENVNEKCKFT LPPLKIHECN ISCPNPLPFR | Truncated 45 |
| | EYRPQTEGVS NLVGLPNNIC LQKTSNQILK PKLISYTLPV | |
| | VGQSGTCITD PLLAMDEGYF AYSHLERIGS CSRGVSKQRI | |
| | IGVGEVLDRG DEVPSLFMTN VWTPPNPNTV YHCSAVYNNE | |
| | FYYVLCAVST VGDPILNSTY WSGSLMMTRL AVKPKSNGGG | |
| | YNQHQLALRS IEKGRYDKVM PYGPSGIKQG DTLYFPAVGF | |
| | LVRTEFKYND SNCPITKCQY SKPENCRLSM GIRPNSHYIL | |
| | RSGLLKYNLS DGENPKVVFI EISDQRLSIG SPSKIYDSLG | |
| | QPVFYQASFS WDTMIKFGDV LTVNPLVVNW RNNTVISRPG | |
| | QSQCPRFNTC PEICWEGVYN DAFLIDRINW ISAGVFLDSN | |
| | QTAENPVFTV FKDNEILYRA QLASEDTNAQ KTITNCFLLK | |
| | NKIWCISLVE IYDTGDNVIR PKLFAVKIPE QCT | |
| 36 | MNTTSDKGK IPSKVIKSYY GTMDIKKINE GLLDSKILSA | NiVG protein |
| | FNTVIALLGS IVIIVMNIMI IQNYTRSTDN QAVIKDALQG | attachment |
| | IQQQIKGLAD KIGTEIGPKV SLIDTSSTIT IPANIGLLGS | glycoprotein |
| | KISQSTASIN ENVNEKCKFT LPPLKIHECN ISCPNPLPFR | Truncated Δ10 |
| | EYRPQTEGVS NLVGLPNNIC LQKTSNQILK PKLISYTLPV | |
| | VGQSGTCITD PLLAMDEGYF AYSHLERIGS CSRGVSKQRI | |
| | IGVGEVLDRG DEVPSLFMTN VWTPPNPNTV YHCSAVYNNE | |
| | FYYVLCAVST VGDPILNSTY WSGSLMMTRL AVKPKSNGGG | |
| | YNQHQLALRS IEKGRYDKVM PYGPSGIKQG DTLYFPAVGF | |
| | LVRTEFKYND SNCPITKCQY SKPENCRLSM GIRPNSHYIL | |
| | RSGLLKYNLS DGENPKVVFI EISDQRLSIG SPSKIYDSLG | |
| | QPVFYQASFS WDTMIKFGDV LTVNPLVVNW RNNTVISRPG | |
| | QSQCPRFNTC PEICWEGVYN DAFLIDRINW ISAGVFLDSN | |
| | QTAENPVFTV FKDNEILYRA QLASEDTNAQ KTITNCFLLK | |
| | NKIWCISLVE IYDTGDNVIR PKLFAVKIPE QCT | |
| 37 | MKGK IPSKVIKSYY GTMDIKKINE GLLDSKILSA FNTVIALLGS | NiVG protein |
| | IVIIVMNIMI IQNYTRSTDN QAVIKDALQG IQQQIKGLAD | attachment |
| | KIGTEIGPKV SLIDTSSTIT IPANIGLLGS KISQSTASIN | glycoprotein |
| | ENVNEKCKFT LPPLKIHECN ISCPNPLPFR EYRPQTEGVS | Truncated Δ15 |
| | NLVGLPNNIC LQKTSNQILK PKLISYTLPV VGQSGTCITD | |
| | PLLAMDEGYF AYSHLERIGS CSRGVSKQRI IGVGEVLDRG | |
| | DEVPSLFMTN VWTPPNPNTV YHCSAVYNNE FYYVLCAVST | |
| | VGDPILNSTY WSGSLMMTRL AVKPKSNGGG YNQHQLALRS | |
| | IEKGRYDKVM PYGPSGIKQG DTLYFPAVGF LVRTEFKYND | |
| | SNCPITKCQY SKPENCRLSM GIRPNSHYIL RSGLLKYNLS | |
| | DGENPKVVFI EISDQRLSIG SPSKIYDSLG QPVFYQASFS | |
| | WDTMIKFGDV LTVNPLVVNW RNNTVISRPG QSQCPRFNTC | |
| | PEICWEGVYN DAFLIDRINW ISAGVFLDSN QTAENPVFTV | |
| | FKDNEILYRA QLASEDTNAQ KTITNCFLLK NKIWCISLVE | |
| | IYDTGDNVIR PKLFAVKIPE QCT | |
| 38 | MSKVIKSYY GTMDIKKINE GLLDSKILSA FNTVIALLGS | NiVG protein |
| | IVIIVMNIMI IQNYTRSTDN QAVIKDALQG IQQQIKGLAD | attachment |
| | KIGTEIGPKV SLIDTSSTIT IPANIGLLGS KISQSTASIN | glycoprotein |
| | ENVNEKCKFT LPPLKIHECN ISCPNPLPFR EYRPQTEGVS | Truncated Δ20 |
| | NLVGLPNNIC LQKTSNQILK PKLISYTLPV VGQSGTCITD | |
| | PLLAMDEGYF AYSHLERIGS CSRGVSKQRI IGVGEVLDRG | |
| | DEVPSLFMTN VWTPPNPNTV YHCSAVYNNE FYYVLCAVST | |
| | VGDPILNSTY WSGSLMMTRL AVKPKSNGGG YNQHQLALRS | |
| | IEKGRYDKVM PYGPSGIKQG DTLYFPAVGF LVRTEFKYND | |
| | SNCPITKCQY SKPENCRLSM GIRPNSHYIL RSGLLKYNLS | |
| | DGENPKVVFI EISDQRLSIG SPSKIYDSLG QPVFYQASFS | |
| | WDTMIKFGDV LTVNPLVVNW RNNTVISRPG QSQCPRFNTC | |
| | PEICWEGVYN DAFLIDRINW ISAGVFLDSN QTAENPVFTV | |
| | FKDNEILYRA QLASEDTNAQ KTITNCFLLK NKIWCISLVE | |
| | IYDTGDNVIR PKLFAVKIPE QCT | |
| 39 | MSYY GTMDIKKINE GLLDSKILSA FNTVIALLGS IVIIVMNIMI | NiVG protein |
| | IQNYTRSTDN QAVIKDALQG IQQQIKGLAD KIGTEIGPKV | attachment |
| | SLIDTSSTIT IPANIGLLGS KISQSTASIN ENVNEKCKFT | glycoprotein |
| | LPPLKIHECN ISCPNPLPFR EYRPQTEGVS NLVGLPNNIC | Truncated Δ25 |
| | LQKTSNQILK PKLISYTLPV VGQSGTCITD PLLAMDEGYF | |
| | AYSHLERIGS CSRGVSKQRI IGVGEVLDRG DEVPSLFMTN | |
| | VWTPPNPNTV YHCSAVYNNE FYYVLCAVST VGDPILNSTY | |
| | WSGSLMMTRL AVKPKSNGGG YNQHQLALRS IEKGRYDKVM | |
| | PYGPSGIKQG DTLYFPAVGF LVRTEFKYND SNCPITKCQY | |
| | SKPENCRLSM GIRPNSHYIL RSGLLKYNLS DGENPKVVFI | |
| | EISDQRLSIG SPSKIYDSLG QPVFYQASFS WDTMIKFGDV | |
| | LTVNPLVVNW RNNTVISRPG QSQCPRFNTC PEICWEGVYN | |
| | DAFLIDRINW ISAGVFLDSN QTAENPVFTV FKDNEILYRA | |
| | QLASEDTNAQ KTITNCFLLK NKIWCISLVE IYDTGDNVIR | |
| | PKLFAVKIPE QCT | |
| 40 | MTMDIKKINE GLLDSKILSA FNTVIALLGS IVIIVMNIMI | NiVG protein |
| | IQNYTRSTDN QAVIKDALQG IQQQIKGLAD KIGTEIGPKV | attachment |
| | SLIDTSSTIT IPANIGLLGS KISQSTASIN ENVNEKCKFT | glycoprotein |
| | LPPLKIHECN ISCPNPLPFR EYRPQTEGVS NLVGLPNNIC | Truncated Δ30 |
| | LQKTSNQILK PKLISYTLPV VGQSGTCITD PLLAMDEGYF | |
| | AYSHLERIGS CSRGVSKQRI IGVGEVLDRG DEVPSLFMTN | |
| | VWTPPNPNTV YHCSAVYNNE FYYVLCAVST VGDPILNSTY | |
| | WSGSLMMTRL AVKPKSNGGG YNQHQLALRS IEKGRYDKVM | |
| | PYGPSGIKQG DTLYFPAVGF LVRTEFKYND SNCPITKCQY | |
| | SKPENCRLSM GIRPNSHYIL RSGLLKYNLS DGENPKVVFI | |
| | EISDQRLSIG SPSKIYDSLG QPVFYQASFS WDTMIKFGDV | |
| | LTVNPLVVNW RNNTVISRPG QSQCPRFNTC PEICWEGVYN | |
| | DAFLIDRINW ISAGVFLDSN QTAENPVFTV FKDNEILYRA | |
| | QLASEDTNAQ KTITNCFLLK NKIWCISLVE IYDTGDNVIR | |
| | PKLFAVKIPE QCT | |
| 41 | GGGGGS | Peptide linker |
| 42 | (GGGGS)n wherein n is 1 to 10 | Peptide linker |
| 43 | GGGGS | Peptide linker |
| 44 | PAENKKVR FENTTSDKGK IPSKVIKSYY GTMDIKKINE | NiVG protein |
| | GLLDSKILSA FNTVIALLGS IVIIVMNIMI IQNYTRSTDN | attachment |
| | QAVIKDALQG IQQQIKGLAD KIGTEIGPKV SLIDTSSTIT | glycoprotein |
| | IPANIGLLGS KISQSTASIN ENVNEKCKFT LPPLKIHECN | (602 aa) |
| | ISCPNPLPFR EYRPQTEGVS NLVGLPNNIC LQKTSNQILK | Without N- |
| | PKLISYTLPV VGQSGTCITD PLLAMDEGYF AYSHLERIGS | terminal |
| | CSRGVSKQRI IGVGEVLDRG DEVPSLFMTN VWTPPNPNTV | methionine |
| | YHCSAVYNNE FYYVLCAVST VGDPILNSTY WSGSLMMTRL | |
| | AVKPKSNGGG YNQHQLALRS IEKGRYDKVM PYGPSGIKQG | |
| | DTLYFPAVGF LVRTEFKYND SNCPITKCQY SKPENCRLSM | |
| | GIRPNSHYIL RSGLLKYNLS DGENPKVVFI EISDQRLSIG | |
| | SPSKIYDSLG QPVFYQASFS WDTMIKFGDV LTVNPLVVNW | |
| | RNNTVISRPG QSQCPRFNTC PEICWEGVYN DAFLIDRINW | |
| | ISAGVFLDSN QTAENPVFTV FKDNEILYRA QLASEDTNAQ | |
| | KTITNCFLLK NKIWCISLVE IYDTGDNVIR PKLFAVKIPE QC | |
| 45 | KVR FENTTSDKGK IPSKVIKSYY GTMDIKKINE GLLDSKILSA | NiVG protein |
| | FNTVIALLGS IVIIVMNIMI IQNYTRSTDN QAVIKDALQG | attachment |
| | IQQQIKGLAD KIGTEIGPKV SLIDTSSTIT IPANIGLLGS | glycoprotein |
| | KISQSTASIN ENVNEKCKFT LPPLKIHECN ISCPNPLPFR | Truncated Δ5 |
| | EYRPQTEGVS NLVGLPNNIC LQKTSNQILK PKLISYTLPV | Without N- |
| | VGQSGTCITD PLLAMDEGYF AYSHLERIGS CSRGVSKQRI | terminal |
| | IGVGEVLDRG DEVPSLFMTN VWTPPNPNTV YHCSAVYNNE | methionine |
| | FYYVLCAVST VGDPILNSTY WSGSLMMTRL AVKPKSNGGG | |
| | YNQHQLALRS IEKGRYDKVM PYGPSGIKQG DTLYFPAVGF | |
| | LVRTEFKYND SNCPITKCQY SKPENCRLSM GIRPNSHYIL | |
| | RSGLLKYNLS DGENPKVVFI EISDQRLSIG SPSKIYDSLG | |
| | QPVFYQASFS WDTMIKFGDV LTVNPLVVNW RNNTVISRPG | |
| | QSQCPRFNTC PEICWEGVYN DAFLIDRINW ISAGVFLDSN | |
| | QTAENPVFTV FKDNEILYRA QLASEDTNAQ KTITNCFLLK | |
| | NKIWCISLVE IYDTGDNVIR PKLFAVKIPE QC | |
| 46 | NTTSDKGK IPSKVIKSYY GTMDIKKINE GLLDSKILSA | NiVG protein |
| | FNTVIALLGS IVIIVMNIMI IQNYTRSTDN QAVIKDALQG | attachment |
| | IQQQIKGLAD KIGTEIGPKV SLIDTSSTIT IPANIGLLGS | glycoprotein |
| | KISQSTASIN ENVNEKCKFT LPPLKIHECN ISCPNPLPFR | Truncated Δ10 |
| | EYRPQTEGVS NLVGLPNNIC LQKTSNQILK PKLISYTLPV | Without N- |
| | VGQSGTCITD PLLAMDEGYF AYSHLERIGS CSRGVSKQRI | terminal |
| | IGVGEVLDRG DEVPSLFMTN VWTPPNPNTV YHCSAVYNNE | methionine |
| | FYYVLCAVST VGDPILNSTY WSGSLMMTRL AVKPKSNGGG | |
| | YNQHQLALRS IEKGRYDKVM PYGPSGIKQG DTLYFPAVGF | |
| | LVRTEFKYND SNCPITKCQY SKPENCRLSM GIRPNSHYIL | |
| | RSGLLKYNLS DGENPKVVFI EISDQRLSIG SPSKIYDSLG | |
| | QPVFYQASFS WDTMIKFGDV LTVNPLVVNW RNNTVISRPG | |
| | QSQCPRFNTC PEICWEGVYN DAFLIDRINW ISAGVFLDSN | |
| | QTAENPVFTV FKDNEILYRA QLASEDTNAQ KTITNCFLLK | |
| | NKIWCISLVE IYDTGDNVIR PKLFAVKIPE QC | |
| 47 | KGK IPSKVIKSYY GTMDIKKINE GLLDSKILSA FNTVIALLGS | NiVG protein |
| | IVIIVMNIMI IQNYTRSTDN QAVIKDALQG IQQQIKGLAD | attachment |
| | KIGTEIGPKV SLIDTSSTIT IPANIGLLGS KISQSTASIN | glycoprotein |
| | ENVNEKCKFT LPPLKIHECN ISCPNPLPFR EYRPQTEGVS | Truncated 4 5 |
| | NLVGLPNNIC LQKTSNQILK PKLISYTLPV VGQSGTCITD | Without N- |
| | PLLAMDEGYF AYSHLERIGS CSRGVSKQRI IGVGEVLDRG | terminal |
| | DEVPSLFMTN VWTPPNPNTV YHCSAVYNNE FYYVLCAVST | methionine |
| | VGDPILNSTY WSGSLMMTRL AVKPKSNGGG YNQHQLALRS | |
| | IEKGRYDKVM PYGPSGIKQG DTLYFPAVGF LVRTEFKYND | |
| | SNCPITKCQY SKPENCRLSM GIRPNSHYIL RSGLLKYNLS | |
| | DGENPKVVFI EISDQRLSIG SPSKIYDSLG QPVFYQASFS | |
| | WDTMIKFGDV LTVNPLVVNW RNNTVISRPG QSQCPRFNTC | |
| | PEICWEGVYN DAFLIDRINW ISAGVFLDSN QTAENPVFTV | |
| | FKDNEILYRA QLASEDTNAQ KTITNCFLLK NKIWCISLVE | |
| | IYDTGDNVIR PKLFAVKIPE QC | |
| 48 | SKVIKSYY GTMDIKKINE GLLDSKILSA FNTVIALLGS | NiVG protein |
| | IVIIVMNIMI IQNYTRSTDN QAVIKDALQG IQQQIKGLAD | attachment |
| | KIGTEIGPKV SLIDTSSTIT IPANIGLLGS KISQSTASIN | glycoprotein |
| | ENVNEKCKFT LPPLKIHECN ISCPNPLPFR EYRPQTEGVS | Truncated Δ20 |
| | NLVGLPNNIC LQKTSNQILK PKLISYTLPV VGQSGTCITD | Without N- |
| | PLLAMDEGYF AYSHLERIGS CSRGVSKQRI IGVGEVLDRG | terminal |
| | DEVPSLFMTN VWTPPNPNTV YHCSAVYNNE FYYVLCAVST | methionine |
| | VGDPILNSTY WSGSLMMTRL AVKPKSNGGG YNQHQLALRS | |
| | IEKGRYDKVM PYGPSGIKQG DTLYFPAVGF LVRTEFKYND | |
| | SNCPITKCQY SKPENCRLSM GIRPNSHYIL RSGLLKYNLS | |
| | DGENPKVVFI EISDQRLSIG SPSKIYDSLG QPVFYQASFS | |
| | WDTMIKFGDV LTVNPLVVNW RNNTVISRPG QSQCPRFNTC | |
| | PEICWEGVYN DAFLIDRINW ISAGVFLDSN QTAENPVFTV | |
| | FKDNEILYRA QLASEDTNAQ KTITNCFLLK NKIWCISLVE | |
| | IYDTGDNVIR PKLFAVKIPE QC | |
| 49 | SYY GTMDIKKINE GLLDSKILSA FNTVIALLGS IVIIVMNIMI | NiVG protein |
| | IQNYTRSTDN QAVIKDALQG IQQQIKGLAD KIGTEIGPKV | attachment |
| | SLIDTSSTIT IPANIGLLGS KISQSTASIN ENVNEKCKFT | glycoprotein |
| | LPPLKIHECN ISCPNPLPFR EYRPQTEGVS NLVGLPNNIC | Truncated Δ25 |
| | LQKTSNQILK PKLISYTLPV VGQSGTCITD PLLAMDEGYF | Without N- |
| | AYSHLERIGS CSRGVSKQRI IGVGEVLDRG DEVPSLFMTN | terminal |
| | VWTPPNPNTV YHCSAVYNNE FYYVLCAVST VGDPILNSTY | methionine |
| | WSGSLMMTRL AVKPKSNGGG YNQHQLALRS IEKGRYDKVM | |
| | PYGPSGIKQG DTLYFPAVGF LVRTEFKYND SNCPITKCQY | |
| | SKPENCRLSM GIRPNSHYIL RSGLLKYNLS DGENPKVVFI | |
| | EISDQRLSIG SPSKIYDSLG QPVFYQASFS WDTMIKFGDV | |
| | LTVNPLVVNW RNNTVISRPG QSQCPRFNTC PEICWEGVYN | |
| | DAFLIDRINW ISAGVFLDSN QTAENPVFTV FKDNEILYRA | |
| | QLASEDTNAQ KTITNCFLLK NKIWCISLVE IYDTGDNVIR | |
| | PKLFAVKIPE QC | |
| 50 | TMDIKKINE GLLDSKILSA FNTVIALLGS IVIIVMNIMI | NiVG protein |
| | IQNYTRSTDN QAVIKDALQG IQQQIKGLAD KIGTEIGPKV | attachment |
| | SLIDTSSTIT IPANIGLLGS KISQSTASIN ENVNEKCKFT | glycoprotein |
| | LPPLKIHECN ISCPNPLPFR EYRPQTEGVS NLVGLPNNIC | Truncated Δ30 |
| | LQKTSNQILK PKLISYTLPV VGQSGTCITD PLLAMDEGYF | Without N- |
| | AYSHLERIGS CSRGVSKQRI IGVGEVLDRG DEVPSLFMTN | terminal |
| | VWTPPNPNTV YHCSAVYNNE FYYVLCAVST VGDPILNSTY | methionine |
| | WSGSLMMTRL AVKPKSNGGG YNQHQLALRS IEKGRYDKVM | |
| | PYGPSGIKQG DTLYFPAVGF LVRTEFKYND SNCPITKCQY | |
| | SKPENCRLSM GIRPNSHYIL RSGLLKYNLS DGENPKVVFI | |
| | EISDQRLSIG SPSKIYDSLG QPVFYQASFS WDTMIKFGDV | |
| | LTVNPLVVNW RNNTVISRPG QSQCPRFNTC PEICWEGVYN | |
| | DAFLIDRINW ISAGVFLDSN QTAENPVFTV FKDNEILYRA | |
| | QLASEDTNAQ KTITNCFLLK NKIWCISLVE IYDTGDNVIR | |
| | PKLFAVKIPE QC | |
| 51 | KKINEGLLDSKILSA FNTVIALLGS IVIIVMNIMI IQNYTRSTDN | NiVG protein |
| | QAVIKDALQG IQQQIKGLAD KIGTEIGPKV SLIDTSSTIT | attachment |
| | IPANIGLLGS KISQSTASIN ENVNEKCKFT LPPLKIHECN | glycoprotein |
| | ISCPNPLPFR EYRPQTEGVS NLVGLPNNIC LQKTSNQILK | Truncated and |
| | PKLISYTLPV VGQSGTCITD PLLAMDEGYF AYSHLERIGS | mutated |
| | CSRGVSKQRI IGVGEVLDRG DEVPSLFMTN VWTPPNPNTV | (E501 A, |
| | YHCSAVYNNE FYYVLCAVST VGDPILNSTY WSGSLMMTRL | W504A, Q530A, |
| | AVKPKSNGGG YNQHQLALRS IEKGRYDKVM PYGPSGIKQG | E533A) NiV G |
| | DTLYFPAVGF LVRTEFKYND SNCPITKCQY SKPENCRLSM | protein (Gc Δ |
| | GIRPNSHYIL RSGLLKYNLS DGENPKVVFI EISDQRLSIG | 34) Without N- |
| | SPSKIYDSLG QPVFYQASFS WDTMIKFGDV LTVNPLVVNW | terminal |
| | RNNTVISRPG QSQCPRFNTC PAICAEGVYN DAFLIDRINW | methionine |
| | ISAGVFLDSN ATAANPVFTV FKDNEILYRA QLASEDTNAQ | |
| | KTITNCFLLK NKIWCISLVE IYDTGDNVIR PKLFAVKIPE QCT | |
| 52 | MADSKLVSL NNNLSGKIKD QGKVIKNYYG TMDIKKINDG | Hendra virus G |
| | LLDSKILGAF | protein Uniprot |
| | NTVIALLGSI IIIVMNIMII QNYTRTTDNQ ALIKESLQSV | O89343 Without |
| | QQQIKALTDK IGTEIGPKVS LIDTSSTITI PANIGLLGSK | N-terminal |
| | ISQSTSSINE NVNDKCKFTL | methionine |
| | PPLKIHECNI SCPNPLPFRE YRPISQGVSD LVGLPNQICL | |
| | QKTTSTILKP RLISYTLPIN TREGVCITDP LLAVDNGFFA | |
| | YSHLEKIGSC TRGIAKQRII GVGEVLDRGD KVPSMFMTNV | |
| | WTPPNPSTIH HCSSTYHEDF YYTLCAVSHV | |
| | GDPILNSTSW TESLSLIRLA VRPKSDSGDY NQKYIAITKV | |
| | ERGKYDKVMP | |
| | YGPSGIKQGD TLYFPAVGFL PRTEFQYNDS NCPIIHCKYS | |
| | KAENCRLSMG | |
| | VNSKSHYILR SGLLKYNLSL GGDIILQFIE IADNRLTIGS | |
| | PSKIYNSLGQ PVFYQASYSW DTMIKLGDVD TVDPLRVQWR | |
| | NNSVISRPGQ SQCPRFNVCP | |
| | EVCWEGTYND AFLIDRLNWV SAGVYLNSNQ TAENPVFAVF | |
| | KDNEILYQVP LAEDDTNAQK TITDCFLLEN VIWCISLVEI | |
| | YDTGDSVIRP KLFAVKIPAQ CSES | |
| 53 | KKINEGLLDSKILSA FNTVIALLGS IVIIVMNIMI IQNYTRSTDN | NiVG protein |
| | QAVIKDALQG IQQQIKGLAD KIGTEIGPKV SLIDTSSTIT | attachment |
| | IPANIGLLGS KISQSTASIN ENVNEKCKFT LPPLKIHECN | glycoprotein |
| | ISCPNPLPFR EYRPQTEGVS NLVGLPNNIC LQKTSNQILK | Truncated (Gc Δ |
| | PKLISYTLPV VGQSGTCITD PLLAMDEGYF AYSHLERIGS | 34) Without N- |
| | CSRGVSKQRI IGVGEVLDRG DEVPSLFMTN VWTPPNPNTV | terminal |
| | YHCSAVYNNE FYYVLCAVST VGDPILNSTY WSGSLMMTRL | methionine |
| | AVKPKSNGGG YNQHQLALRS IEKGRYDKVM PYGPSGIKQG | |
| | DTLYFPAVGF LVRTEFKYND SNCPITKCQY SKPENCRLSM | |
| | GIRPNSHYIL RSGLLKYNLS DGENPKVVFI EISDQRLSIG | |
| | SPSKIYDSLG QPVFYQASFS WDTMIKFGDV LTVNPLVVNW | |
| | RNNTVISRPG QSQCPRFNTC PEICWEGVYN DAFLIDRINW | |
| | ISAGVFLDSN QTAENPVFTV FKDNEILYRA QLASEDTNAQ | |
| | KTITNCFLLK NKIWCISLVE IYDTGDNVIR PKLFAVKIPE QCT | |
| 54 | LSQLQKNYLDNSNQQGDKMNNPDKKLSVNFNPLELDKGQKDLNKSYYVKNK | gb: JQ001776: 81 |
| | NYNVSNLLNESLHDIKFCIYCIFSLLIIITIINIITISIVITRLKVHEENN | 70- |
| | GMESPNLQSIQDSLSSLTNMINTEITPRIGILVTATSVTLSSSINYVGTKT | 10275\|Organism: |
| | NQLVNELKDYITKSCGFKVPELKLHECNISCADPKISKSAMYSTNAYAELA | Cedar |
| | GPPKIFCKSVSKDPDFRLKQIDYVIPVQQDRSICMNNPLLDISDGFFTYIH | virus\|Strain |
| | YEGINSCKKSDSFKVLLSHGEIVDRGDYRPSLYLLSSHYHPYSMQVINCVP | Name: CG1a\|Prot |
| | VTCNQSSFVFCHISNNTKTLDNSDYSSDEYYITYFNGIDRPKTKKIPINNM | ein |
| | TADNRYIHFTFSGGGGVCLGEEFIIPVTTVINTDVFTHDYCESFNCSVQTG | Name: attachmen |
| | KSLKEICSESLRSPTNSSRYNLNGIMIISQNNMTDFKIQLNGITYNKLSFG | t |
| | SPGRLSKTLGQVLYYQSSMSWDTYLKAGFVEKWKPFTPNWMNNTVISRPNQ | glycoprotein\|Gen |
| | GNCPRYHKCPEICYGGTYNDIAPLDLGKDMYVSVILDSDQLAENPEITVFN | e Symbol: G |
| | STTILYKERVSKDELNTRSTTTSCFLFLDEPWCISVLETNRFNGKSIRPEI | Without N- |
| | YSYKIPKYC | terminal |
| | | methionine |
| 55 | PQKTVEFINMNSPLERGVSTLSDKKTLNQSKITKQGYFGLGSHSERNWKKQ | gb: NC_025256: 9 |
| | KNQNDHYMTVSTMILEILVVLGIMFNLIVLTMVYYQNDNINQRMAELTSNI | 117- |
| | TVLNLNLNQLTNKIQREIIPRITLIDTATTITIPSAITYILATLTTRISEL | 11015\|Organism: |
| | LPSINQKCEFKTPTLVLNDCRINCTPPLNPSDGVKMSSLATNLVAHGPSPC | Bat |
| | RNFSSVPTIYYYRIPGLYNRTALDERCILNPRLTISSTKFAYVHSEYDKNC | Paramyxovirus |
| | TRGFKYYELMTFGEILEGPEKEPRMFSRSFYSPTNAVNYHSCTPIVTVNEG | Eid_hel/GH- |
| | YFLCLECTSSDPLYKANLSNSTFHLVILRHNKDEKIVSMPSFNLSTDQEYV | M74a/GHA/200 |
| | QIIPAEGGGTAESGNLYFPCIGRLLHKRVTHPLCKKSNCSRTDDESCLKSY | 9\|Strain |
| | YNQGSPQHQVVNCLIRIRNAQRDNPTWDVITVDLTNTYPGSRSRIFGSFSK | Name: BatPV/Ei |
| | PMLYQSSVSWHTLLQVAEITDLDKYQLDWLDTPYISRPGGSECPFGNYCPT | d_hel/GH- |
| | VCWEGTYNDVYSLTPNNDLFVTVYLKSEQVAENPYFAIFSRDQILKEFPLD | M74a/GHA/200 |
| | AWISSARTTTISCFMFNNEIWCIAALEITRLNDDIIRPIYYSFWLPTDCRT | 9\|Protein |
| | PYPHTGKMTRVPLRSTYNY | Name: glycoprote |
| | | in\|Gene |
| | | Symbol: G |
| | | Without N- |
| | | terminal |
| | | methionine |
| 56 | ATNRDNTITSAEVSQEDKVKKYYGVETAEKVADSISGNKVFILMNTLLILT | gb: NC_025352: 8 |
| | GAIITITLNITNLTAAKSQQNMLKIIQDDVNAKLEMFVNLDQLVKGEIKPK | 716- |
| | VSLINTAVSVSIPGQISNLQTKFLQKYVYLEESITKQCTCNPLSGIFPTSG | 11257\|Organism: |
| | PTYPPTDKPDDDTTDDDKVDTTIKPIEYPKPDGCNRTGDHFTMEPGANFYT | Mojiang |
| | VPNLGPASSNSDECYTNPSFSIGSSIYMFSQEIRKTDCTAGEILSIQIVLG | virus\|Strain |
| | RIVDKGQQGPQASPLLVWAVPNPKIINSCAVAAGDEMGWVLCSVTLTAASG | Name: Tongguan |
| | EPIPHMFDGFWLYKLEPDTEVVSYRITGYAYLLDKQYDSVFIGKGGGIQKG | 1\|Protein |
| | NDLYFQMYGLSRNRQSFKALCEHGSCLGTGGGGYQVLCDRAVMSFGSEESL | Name: attachmen |
| | ITNAYLKVNDLASGKPVIIGQTFPPSDSYKGSNGRMYTIGDKYGLYLAPSS | t |
| | WNRYLRFGITPDISVRSTTWLKSQDPIMKILSTCTNTDRDMCPEICNTRGY | glycoprotein\|lGen |
| | QDIFPLSEDSEYYTYIGITPNNGGTKNFVAVRDSDGHIASIDILQNYYSIT | e Symbol: G |
| | SATISCFMYKDEIWCIAITEGKKQKDNPQRIYAHSYKIRQMCYNMKSATVT | Without N- |
| | VGNAKNITIRRY | terminal |
| | | methionine |
| 57 | DFDKLNKIGVVQGRVLNYKIKGDPMTKDLVLKFIPNIVNITECVREPLSRY | gb: JQ001776: 61 |
| | NETVRRLLLPIHNMLGLYLNNTNAKMTGLMIAGVIMGGIAIGIATAAQITA | 29- |
| | GFALYEAKKNTENIQKLTDSIMKTQDSIDKLTDSVGTSILILNKLQTYINN | 8166\|Organism: |
| | QLVPNLELLSCRQNKIEFDLMLTKYLVDLMTVIGPNINNPVNKDMTIQSLS | Cedar |
| | LLFDGNYDIMMSELGYTPQDFLDLIESKSITGQIIYVDMENLYVVIRTYLP | virus\|Strain |
| | TLIEVPDAQIYEFNKITMSSNGGEYLSTIPNFILIRGNYMSNIDVATCYMT | Name: CG1a\|Prot |
| | KASVICNQDYSLPMSQNLRSCYQGETEYCPVEAVIASHSPRFALTNGVIFA | ein Name: fusion |
| | NCINTICRCQDNGKTITQNINQFVSMIDNSTCNDVMVDKFTIKVGKYMGRK | glycoprotein\|Gen |
| | DINNINIQIGPQIIIDKVDLSNEINKMNQSLKDSIFYLREAKRILDSVNIS | e Symbol: F |
| | LISPSVQLFLIIISVLSFIILLIIIVYLYCKSKHSYKYNKFIDDPDYYNDY | (without signal |
| | KRERINGKASKSNNIYYVGD | sequence) |
| 58 | SRALLRETDNYSNGLIVENLVRNCHHPSKNNLNYTKTQKRDSTIPYRVEER | gb: NC_025256: 6 |
| | KGHYPKIKHLIDKSYKHIKRGKRRNGHNGNIITIILLLILILKTQMSEGAI | 865- |
| | HYETLSKIGLIKGITREYKVKGTPSSKDIVIKLIPNVTGLNKCTNISMENY | 8853\|Organism: |
| | KEQLDKILIPINNIIELYANSTKSAPGNARFAGVIIAGVALGVAAAAQITA | Bat |
| | GIALHEARQNAERINLLKDSISATNNAVAELQEATGGIVNVITGMQDYINT | Paramyxovirus |
| | NLVPQIDKLQCSQIKTALDISLSQYYSEILTVFGPNLQNPVTTSMSIQAIS | Eid_hel/GH- |
| | QSFGGNIDLLLNLLGYTANDLLDLLESKSITGQITYINLEHYFMVIRVYYP | M74a/GHA/200 |
| | IMTTISNAYVQELIKISFNVDGSEWVSLVPSYILIRNSYLSNIDISECLIT | 9\|Strain |
| | KNSVICRHDFAMPMSYTLKECLTGDTEKCPREAVVTSYVPRFAISGGVIYA | Name: BatPV/Ei |
| | NCLSTTCQCYQTGKVIAQDGSQTLMMIDNQTCSIVRIEEILISTGKYLGSQ | d_hel/GH- |
| | EYNTMHVSVGNPVFTDKLDITSQISNINQSIEQSKFYLDKSKAILDKINLN | M74a/GHA/200 |
| | LIGSVPISILFIIAILSLILSIITFVIVMIIVRRYNKYTPLINSDPSSRRS | 9\|Protein |
| | TIQDVYIIPNPGEHSIRSAARSIDRDRD | Name: fusion |
| | | proteinlGene |
| | | Symbol: F |
| | | (without signal |
| | | sequence) |
| 59 | ILHY EKLSKIGLVK GITRKYKIKS | Hendra virus F |
| | NPLTKDIVIK MIPNVSNVSK CTGTVMENYK SRLTGILSPI | protein |
| | KGAIELYNNN | Uniprot O89342 |
| | THDLVGDVKL AGVVMAGIAI GIATAAQITA GVALYEAMKN | (without signal |
| | ADNINKLKSS | sequence) |
| | IESTNEAVVK LQETAEKTVY VLTALQDYIN TNLVPTIDQI | |
| | SCKQTELALD | |
| | LALSKYLSDL LFVFGPNLQD PVSNSMTIQA ISQAFGGNYE | |
| | TLLRTLGYAT EDFDDLLESD SIAGQIVYVD LSSYYIIVRV | |
| | YFPILTEIQQ AYVQELLPVS | |
| | FNNDNSEWIS IVPNFVLIRN TLISNIEVKY CLITKKSVIC | |
| | NQDYATPMTA | |
| | SVRECLTGST DKCPRELVVS SHVPRFALSG GVLFANCISV | |
| | TCQCQTTGRA ISQSGEQTLL MIDNTTCTTV VLGNIIISLG | |
| | KYLGSINYNS ESIAVGPPVY | |
| | TDKVDISSQI SSMNQSLQQS KDYIKEAQKI LDTVNPSLIS | |
| | MLSMIILYVL | |
| | SIAALCIGLI TFISFVIVEK KRGNYSRLDD RQVRPVSNGD LYYIGT | |
| 60 | IHYDSLSKVGVIKGLTYNYKIKGSPSTKLMVVKLIPNIDSVKNCTQKQYDE | gb: NC_025352: 5 |
| | YKNLVRKALEPVKMAIDTMLNNVKSGNNKYRFAGAIMAGVALGVATAATVT | 950- |
| | AGIALHRSNENAQAIANMKSAIQNTNEAVKQLQLANKQTLAVIDTIRGEIN | 8712\|Organism: |
| | NNIIPVINQLSCDTIGLSVGIRLTQYYSEIITAFGPALQNPVNTRITIQAI | Mojiang |
| | SSVFNGNFDELLKIMGYTSGDLYEILHSELIRGNIIDVDVDAGYIALEIEF | virus\|Strain |
| | PNLTLVPNAVVQELMPISYNIDGDEWVILVPRFVLTRTTLLSNIDTSRCTI | Name: Tongguan |
| | TDSSVICDNDYALPMSHELIGCLQGDTSKCAREKVVSSYVPKFALSDGLVY | 1\|Protein |
| | ANCLNTICRCMDTDTPISQSLGATVSLLDNKRCSVYQVGDVLISVGSYLGD | Name: fusion |
| | GEYNADNVELGPPIVIDKIDIGNQLAGINQTLQEAEDYIEKSEEFLKGVNP | protein\|Gene |
| | SIITLGSMVVLYIFMILIAIVSVIALVLSIKLTVKGNVVRQQFTYTQHVPS | Symbol: F |
| | MENINYVSH | (without signal |
| | | sequence) |
| 61 | MLFNLRILLNNAAFRNGHNFMVRNFRCGQPLQNKVQLKGRDLLTL | OTC |
| | KNFTGEEIKYMLWLSADLKFRIKQKGEYLPLLQGKSLGMIFEKRSTR | |
| | TRLSTETGFALLGGHPCFLTTQDIHLGVNESLTDTARVLSSMADAVL | |
| | ARVYKQSDLDTLAKEASIPIINGLSDLYHPIQILADYLTLQEHYSSLK | |
| | GLTLSWIGDGNNILHSIMMSAAKFGMHLQAATPKGYEPDASVTKL | |
| | AEQYAKENGTKLLLTNDPLEAAHGGNVLITDTWISMGQEEEKKKR | |
| | LQAFQGYQVTMKTAKVAASDWTFLHCLPRKPEEVDDEVFYSPRSL | |
| | VFPEAENRKWTIMAVMVSLLTDYSPQLQKPKF | |
| 62 | MTRILTAFKVVRTLKTGFGFTNVTAHQKWKFSRPGIRLLSVKAQTA | CPS1 |
| | HIVLEDGTKMKGYSFGHPSSVAGEVVFNTGLGGYPEAITDPAYKGQ | |
| | ILTMANPIIGNGGAPDTTALDELGLSKYLESNGIKVSGLLVLDYSKD | |
| | YNHWLATKSLGQWLQEEKVPAIYGVDTRMLTKIIRDKGTMLGKIEF | |
| | EGQPVDFVDPNKQNLIAEVSTKDVKVYGKGNPTKVVAVDCGIKNN | |
| | VIRLLVKRGAEVHLVPWNHDFTKMEYDGILIAGGPGNPALAEPLIQ | |
| | NVRKILESDRKEPLFGISTGNLITGLAAGAKTYKMSMANRGQNQPV | |
| | LNITNKQAFITAQNHGYALDNTLPAGWKPLFVNVNDQTNEGIMHES | |
| | KPFFAVQFHPEVTPGPIDTEYLFDSFFSLIKKGKATTITSVLPKPALVA | |
| | SRVEVSKVLILGSGGLSIGQAGEFDYSGSQAVKAMKEENVKTVLMN | |
| | PNIASVQTNEVGLKQADTVYFLPITPQFVTEVIKAEQPDGLILGMGG | |
| | QTALNCGVELFKRGVLKEYGVKVLGTSVESIMATEDRQLFSDKLNE | |
| | INEKIAPSFAVESIEDALKAADTIGYPVMIRSAYALGGLGSGICPNRE | |
| | TLMDLSTKAFAMTNQILVEKSVTGWKEIEYEVVRDADDNCVTVCN | |
| | MENVDAMGVHTGDSVVVAPAQTLSNAEFQMLRRTSINVVRHLGIV | |
| | GECNIQFALHPTSMEYCIIEVNARLSRSSALASKATGYPLAFIAAKIA | |
| | LGIPLPEIKNVVSGKTSACFEPSLDYMVTKIPRWDLDRFHGTSSRIGS | |
| | SMKSVGEVMAIGRTFEESFQKALRMCHPSIEGFTPRLPMNKEWPSN | |
| | LDLRKELSEPSSTRIYAIAKAIDDNMSLDEIEKLTYIDKWFLYKMRDI | |
| | LNMEKTLKGLNSESMTEETLKRAKEIGFSDKQISKCLGLTEAQTREL | |
| | RLKKNIHPWVKQIDTLAAEYPSVTNYLYVTYNGQEHDVNFDDHGM | |
| | MVLGCGPYHIGSSVEFDWCAVSSIRTLRQLGKKTVVVNCNPETVST | |
| | DFDECDKLYFEELSLERILDIYHQEACGGCIISVGGQIPNNLAVPLYK | |
| | NGVKIMGTSPLQIDRAEDRSIFSAVLDELKVAQAPWKAVNTLNEAL | |
| | EFAKSVDYPCLLRPSYVLSGSAMNVVFSEDEMKKFLEEATRVSQEH | |
| | PVVLTKFVEGAREVEMDAVGKDGRVISHAISEHVEDAGVHSGDAT | |
| | LMLPTQTISQGAIEKVKDATRKIAKAFAISGPFNVQFLVKGNDVLVI | |
| | ECNLRASRSFPFVSKTLGVDFIDVATKVMIGENVDEKHLPTLDHPIIP | |
| | ADYVAIKAPMFSWPRLRDADPILRCEMASTGEVACFGEGIHTAFLK | |
| | AMLSTGFKIPQKGILIGIQQSFRPRFLGVAEQLHNEGFKLFATEATSD | |
| | WLNANNVPATPVAWPSQEGQNPSLSSIRKLIRDGSIDLVINLPNNNT | |
| | KFVHDNYVIRRTAVDSGIPLLTNFQVTKLFAEAVQKSRKVDSKSLF | |
| | HYRQYSAGKAA | |
| 63 | MATALMAVVLRAAAVAPRLRGRGGTGGARRLSCGARRRAARGTS | NAGS |
| | PGRRLSTAWSQPQPPPEEYAGADDVSQSPVAEEPSWVPSPRPPVPHE | |
| | SPEPPSGRSLVQRDIQAFLNQCGASPGEARHWLTQFQTCHHSADKPF | |
| | AVIEVDEEVLKCQQGVSSLAFALAFLQRMDMKPLVVLGLPAPTAPS | |
| | GCLSFWEAKAQLAKSCKVLVDALRHNAAAAVPFFGGGSVLRAAEP | |
| | APHASYGGIVSVETDLLQWCLESGSIPILCPIGETAARRSVLLDSLEV | |
| | TASLAKALRPTKIIFLNNTGGLRDSSHKVLSNVNLPADLDLVCNAE | |
| | WVSTKERQQMRLIVDVLSRLPHHSSAVITAASTLLTELFSNKGSGTL | |
| | FKNAERMLRVRSLDKLDQGRLVDLVNASFGKKLRDDYLASLRPRL | |
| | HSIYVSEGYNAAAILTMEPVLGGTPYLDKFVVSSSRQGQGSGQMLW | |
| | ECLRRDLQTLFWRSRVTNPINPWYFKHSDGSFSNKQWIFFWFGLAD | |
| | IRDSYELVNHAKGLPDSFHKPASDPGS | |
| 64 | MAVAIAAARVWRLNRGLSQAALLLLRQPGARGLARSHPPRQQQQF | BCKDHA |
| | SSLDDKPQFPGASAEFIDKLEFIQPNVISGIPIYRVMDRQGQIINPSEDP | |
| | HLPKEKVLKLYKSMTLLNTMDRILYESQRQGRISFYMTNYGEEGTH | |
| | VGSAAALDNTDLVFGQYREAGVLMYRDYPLELFMAQCYGNISDLG | |
| | KGRQMPVHYGCKERHFVTISSPLATQIPQAVGAAYAAKRANANRV | |
| | VICYFGEGAASEGDAHAGFNFAATLECPIIFFCRNNGYAISTPTSEQY | |
| | RGDGIAARGPGYGIMSIRVDGNDVFAVYNATKEARRRAVAENQPF | |
| | LIEAMTYRIGHHSTSDDSSAYRSVDEVNYWDKQDHPISRLRHYLLS | |
| | QGWWDEEQEKAWRKQSRRKVMEAFEQAERKPKPNPNLLFSDVYQ | |
| | EMPAQLRKQQESLARHLQTYGEHYPLDHFDK | |
| 65 | MAVVAAAAGWLLRLRAAGAEGHWRRLPGAGLARGFLHPAATVE | BCKDHB |
| | DAAQRRQVAHFTFQPDPEPREYGQTQKMNLFQSVTSALDNSLAKD | |
| | PTAVIFGEDVAFGGVFRCTVGLRDKYGKDRVFNTPLCEQGIVGFGIG | |
| | IAVTGATAIAEIQFADYIFPAFDQIVNEAAKYRYRSGDLFNCGSLTIR | |
| | SPWGCVGHGALYHSQSPEAFFAHCPGIKVVIPRSPFQAKGLLLSCIE | |
| | DKNPCIFFEPKILYRAAAEEVPIEPYNIPLSQAEVIQEGSDVTLVAWG | |
| | TQVHVIREVASMAKEKLGVSCEVIDLRTIIPWDVDTICKSVIKTGRLL | |
| | ISHEAPLTGGFASEISSTVQEECFLNLEAPISRVCGYDTPFPHIFEPFYI | |
| | PDKWKCYDALRKMINY | |
| 66 | MAAVRMLRTWSRNAGKLICVRYFQTCGNVHVLKPNYVCFFGYPSF | DBT |
| | KYSHPHHFLKTTAALRGQVVQFKLSDIGEGIREVTVKEWYVKEGDT | |
| | VSQFDSICEVQSDKASVTITSRYDGVIKKLYYNLDDIAYVGKPLVDI | |
| | ETEALKDSEEDVVETPAVSHDEHTHQEIKGRKTLATPAVRRLAMEN | |
| | NIKLSEVVGSGKDGRILKEDILNYLEKQTGAILPPSPKVEIMPPPPKP | |
| | KDMTVPILVSKPPVFTGKDKTEPIKGFQKAMVKTMSAALKIPHFGY | |
| | CDEIDLTELVKLREELKPIAFARGIKLSFMPFFLKAASLGLLQFPILNA | |
| | SVDENCQNITYKASHNIGIAMDTEQGLIVPNVKNVQICSIFDIATELN | |
| | RLQKLGSVGQLSTTDLTGGTFTLSNIGSIGGTFAKPVIMPPEVAIGAL | |
| | GSIKAIPRFNQKGEVYKAQIMNVSWSADHRVIDGATMSRFSNLWKS | |
| | YLENPAFMLLDLK | |
| 67 | MQSWSRVYCSLAKRGHFNRISHGLQGLSAVPLRTYADQPIDADVTV | DLD |
| | IGSGPGGYVAAIKAAQLGFKTVCIEKNETLGGTCLNVGCIPSKALLN | |
| | NSHYYHMAHGKDFASRGIEMSEVRLNLDKMMEQKSTAVKALTGGI | |
| | AHLFKQNKVVHVNGYGKITGKNQVTATKADGGTQVIDTKNILIATG | |
| | SEVTPFPGITIDEDTIVSSTGALSLKKVPEKMVVIGAGVIGVELGSVW | |
| | QRLGADVTAVEFLGHVGGVGIDMEISKNFQRILQKQGFKFKLNTKV | |
| | TGATKKSDGKIDVSIEAASGGKAEVITCDVLLVCIGRRPFTKNLGLE | |
| | ELGIELDPRGRIPVNTRFQTKIPNIYAIGDVVAGPMLAHKAEDEGIIC | |
| | VEGMAGGAVHIDYNCVPSVIYTHPEVAWVGKSEEQLKEEGIEYKV | |
| | GKFPFAANSRAKTNADTDGMVKILGQKSTDRVLGAHILGPGAGEM | |
| | VNEAALALEYGASCEDIARVCHAHPTLSEAFREANLAASFGKSINF | |
| 68 | MLRAKNQLFLLSPHYLRQVKESSGSRLIQQRLLHQQQPLHPEWAAL | MUT |
| | AKKQLKGKNPEDLIWHTPEGISIKPLYSKRDTMDLPEELPGVKPFTR | |
| | GPYPTMYTFRPWTIRQYAGFSTVEESNKFYKDNIKAGQQGLSVAFD | |
| | LATHRGYDSDNPRVRGDVGMAGVAIDTVEDTKILFDGIPLEKMSVS | |
| | MTMNGAVIPVLANFIVTGEEQGVPKEKLTGTIQNDILKEFMVRNTYI | |
| | FPPEPSMKIIADIFEYTAKHMPKFNSISISGYHMQEAGADAILELAYT | |
| | LADGLEYSRTGLQAGLTIDEFAPRLSFFWGIGMNFYMEIAKMRAGR | |
| | RLWAHLIEKMFQPKNSKSLLLRAHCQTSGWSLTEQDPYNNIVRTAI | |
| | EAMAAVFGGTQSLHTNSFDEALGLPTVKSARIARNTQIIIQEESGIPK | |
| | VADPWGGSYMMECLTNDVYDAALKLINEIEEMGGMAKAVAEGIP | |
| | KLRIEECAARRQARIDSGSEVIVGVNKYQLEKEDAVEVLAIDNTSVR | |
| | NRQIEKLKKIKSSRDQALAERCLAALTECAASGDGNILALAVDASR | |
| | ARCTVGEITDALKKVFGEHKANDRMVSGAYRQEFGESKEITSAIKR | |
| | VHKFMEREGRRPRLLVAKMGQDGHDRGAKVIATGFADLGFDVDIG | |
| | PLFQTPREVAQQAVDADVHAVGISTLAAGHKTLVPELIKELNSLGRP | |
| | DILVMCGGVIPPQDYEFLFEVGVSNVFGPGTRIPKAAVQVLDDIEKC | |
| | LEKKQQSV | |
| 69 | MPMLLPHPHQHFLKGLLRAPFRCYHFIFHSSTHLGSGIPCAQPFNSL | MMAA |
| | GLHCTKWMLLSDGLKRKLCVQTTLKDHTEGLSDKEQRFVDKLYTG | |
| | LIQGQRACLAEAITLVESTHSRKKELAQVLLQKVLLYHREQEQSNK | |
| | GKPLAFRVGLSGPPGAGKSTFIEYFGKMLTERGHKLSVLAVDPSSCT | |
| | SGGSLLGDKTRMTELSRDMNAYIRPSPTRGTLGGVTRTTNEAILLCE | |
| | GAGYDIILIETVGVGQSEFAVADMVDMFVLLLPPAGGDELQGIKRGI | |
| | IEMADLVAVTKSDGDLIVPARRIQAEYVSALKLLRKRSQVWKPKVI | |
| | RISARSGEGISEMWDKMKDFQDLMLASGELTAKRRKQQKVWMWN | |
| | LIQESVLEHFRTHPTVREQIPLLEQKVLIGALSPGLAADFLLKAFKSR | |
| | D | |
| 70 | [sequence omitted] | MMAB |
| | PQPSSKTPRIPKIYTKTGDKGFSSTFTGERRPKDDQVFEAVGTTDELS | |
| | SAIGFALELVTEKGHTFAEELQKIQCTLQDVGSALATPCSSAREAHL | |
| | KYTTFKAGPILELEQWIDKYTSQLPPLTAFILPSGGKISSALHFCRAV | |
| | CRRAERRVVPLVQMGETDANVAKFLNRLSDYLFTLARYAAMKEG | |
| | NQEKIYMKNDPSAESEGL | |
| 71 | MFDRALKPFLQSCHLRMLTDPVDQCVAYHLGRVRESLPELQIEIIAD | MMACHC |
| | YEVHPNRRPKILAQTAAHVAGAAYYYQRQDVEADPWGNQRISGVC | |
| | IHPRFGGWFAIRGVVLLPGIEVPDLPPRKPHDCVPTRADRIALLEGFN | |
| | FHWRDWTYRDAVTPQERYSEEQKAYFSTPPAQRLALLGLAQPSEKP | |
| | SSPSPDLPFTTPAPKKPGNPSRARSWLSPRVSPPASPGP | |
| 72 | MANVLCNRARLVSYLPGFCSLVKRVVNPKAFSTAGSSGSDESHVA | MMADHC |
| | AAPPDICSRTVWPDETMGPFGPQDQRFQLPGNIGFDCHLNGTASQK | |
| | KSLVHKTLPDVLAEPLSSERHEFVMAQYVNEFQGNDAPVEQEINSA | |
| | ETYFESARVECAIQTCPELLRKDFESLFPEVANGKLMILTVTQKTKN | |
| | DMTVWSEEVEIEREVLLEKFINGAKEICYALRAEGYWADFIDPSSGL | |
| | AFFGPYTNNTLFETDERYRHLGFSVDDLGCCKVIRHSLWGTHVVVG | |
| | SIFTNATPDSHIMKKLSGN | |
| 73 | MARVLKAAAANAVGLFSRLQAPIPTVRASSTSQPLDQVTGSVWNL | MCEE |
| | GRLNHVAIAVPDLEKAAAFYKNILGAQVSEAVPLPEHGVSVVFVNL | |
| | GNTKMELLHPLGRDSPIAGFLQKNKAGGMHHICIEVDNINAAVMDL | |
| | KKKKIRSLSEEVKIGAHGKPVIFLHPKDCGGVLVELEQA | |
| 74 | MAGFWVGTAPLVAAGRRGRWPPQQLMLSAALRTLKHVLYYSRQC | PCCA |
| | LMVSRNLGSVGYDPNEKTFDKILVANRGEIACRVIRTCKKMGIKTV | |
| | AIHSDVDASSVHVKMADEAVCVGPAPTSKSYLNMDAIMEAIKKTR | |
| | AQAVHPGYGFLSENKEFARCLAAEDVVFIGPDTHAIQAMGDKIESK | |
| | LLAKKAEVNTIPGFDGVVKDAEEAVRIAREIGYPVMIKASAGGGGK | |
| | GMRIAWDDEETRDGFRLSSQEAASSFGDDRLLIEKFIDNPRHIEIQVL | |
| | GDKHGNALWLNERECSIQRRNQKVVEEAPSIFLDAETRRAMGEQA | |
| | VALARAVKYSSAGTVEFLVDSKKNFYFLEMNTRLQVEHPVTECITG | |
| | LDLVQEMIRVAKGYPLRHKQADIRINGWAVECRVYAEDPYKSFGLP | |
| | SIGRLSQYQEPLHLPGVRVDSGIQPGSDISIYYDPMISKLITYGSDRTE | |
| | ALKRMADALDNYVIRGVTHNIALLREVIINSRFVKGDISTKFLSDVY | |
| | PDGFKGHMLTKSEKNQLLAIASSLFVAFQLRAQHFQENSRMPVIKP | |
| | DIANWELSVKLHDKVHTVVASNNGSVFSVEVDGSKLNVTSTWNLA | |
| | SPLLSVSVDGTQRTVQCLSREAGGNMSIQFLGTVYKVNILTRLAAEL | |
| | NKFMLEKVTEDTSSVLRSPMPGVVVAVSVKPGDAVAEGQEICVIEA | |
| | MKMQNSMTAGKTGTVKSVHCQAGDTVGEGDLLVELE | |
| 75 | MAAALRVAAVGARLSVLASGLRAAVRSLCSQATSVNERIENKRRT | PCCB |
| | ALLGGGQRRIDAQHKRGKLTARERISLLLDPGSFVESDMFVEHRCA | |
| | DFGMAADKNKFPGDSVVTGRGRINGRLVYVFSQDFTVFGGSLSGA | |
| | HAQKICKIMDQAITVGAPVIGLNDSGGARIQEGVESLAGYADIFLRN | |
| | VTASGVIPQISLIMGPCAGGAVYSPALTDFTFMVKDTSYLFITGPDV | |
| | VKSVTNEDVTQEELGGAKTHTTMSGVAHRAFENDVDALCNLRDFF | |
| | NYLPLSSQDPAPVRECHDPSDRLVPELDTIVPLESTKAYNMVDIIHSV | |
| | VDEREFFEIMPNYAKNIIVGFARMNGRTVGIVGNQPKVASGCLDINS | |
| | SVKGARFVRFCDAFNIPLITFVDVPGFLPGTAQEYGGIIRHGAKLLY | |
| | AFAEATVPKVTVITRKAYGGAYDVMSSKHLCGDTNYAWPTAEIAV | |
| | MGAKGAVEIIFKGHENVEAAQAEYIEKFANPFPAAVRGFVDDIIQPS | |
| | STRARICCDLDVLASKKVQRPWRKHANIPL | |
| 76 | MAVESQGGRPLVLGLLLCVLGPVVSHAGKILLIPVDGSHWLSMLGA | UGT1A1 |
| | IQQLQQRGHEIVVLAPDASLYIRDGAFYTLKTYPVPFQREDVKESFV | |
| | SLGHNVFENDSFLQRVIKTYKKIKKDSAMLLSGCSHLLHNKELMAS | |
| | LAESSFDVMLTDPFLPCSPIVAQYLSLPTVFFLHALPCSLEFEATQCP | |
| | NPFSYVPRPLSSHSDHMTFLQRVKNMLIAFSQNFLCDVVYSPYATL | |
| | ASEFLQREVTVQDLLSSASVWLFRSDFVKDYPRPIMPNMVFVGGIN | |
| | CLHQNPLSQEFEAYINASGEHGIVVFSLGSMVSEIPEKKAMAIADAL | |
| | GKIPQTVLWRYTGTRPSNLANNTILVKWLPQNDLLGHPMTRAFITH | |
| | AGSHGVYESICNGVPMVMMPLFGDQMDNAKRMETKGAGVTLNVL | |
| | EMTSEDLENALKAVINDKSYKENIMRLSSLHKDRPVEPLDLAVFWV | |
| | EFVMRHKGAPHLRPAAHDLTWYQYHSLDVIGFLLAVVLTVAFITFK | |
| | CCAYGYRKCLGKKGRVKKAHKSKTH | |
| 77 | MSSKGSVVLAYSGGLDTSCILVWLKEQGYDVIAYLANIGQKEDFEE | ASS1 |
| | ARKKALKLGAKKVFIEDVSREFVEEFIWPAIQSSALYEDRYLLGTSL | |
| | ARPCIARKQVEIAQREGAKYVSHGATGKGNDQVRFELSCYSLAPQI | |
| | KVIAPWRMPEFYNRFKGRNDLMEYAKQHGIPIPVTPKNPWSMDEN | |
| | LMHISYEAGILENPKNQAPPGLYTKTQDPAKAPNTPDILEIEFKKGVP | |
| | VKVTNVKDGTTHQTSLELFMYLNEVAGKHGVGRIDIVENRFIGMKS | |
| | RGIYETPAGTILYHAHLDIEAFTMDREVRKIKQGLGLKFAELVYTGF | |
| | WHSPECEFVRHCIAKSQERVEGKVQVSVLKGQVYILGRESPLSLYN | |
| | EELVSMNVQGDYEPTDATGFININSLRLKEYHRLQSKVTAK | |
| 78 | MSTAVLENPGLGRKLSDFGQETSYIEDNCNQNGAISLIFSLKEEVGA | PAH |
| | LAKVLRLFEENDVNLTHIESRPSRLKKDEYEFFTHLDKRSLPALTNII | |
| | KILRHDIGATVHELSRDKKKDTVPWFPRTIQELDRFANQILSYGAEL | |
| | DADHPGFKDPVYRARRKQFADIAYNYRHGQPIPRVEYMEEEKKTW | |
| | GTVFKTLKSLYKTHACYEYNHIFPLLEKYCGFHEDNIPQLEDVSQFL | |
| | QTCTGFRLRPVAGLLSSRDFLGGLAFRVFHCTQYIRHGSKPMYTPEP | |
| | DICHELLGHVPLFSDRSFAQFSQEIGLASLGAPDEYIEKLATIYWFTV | |
| | EFGLCKQGDSIKAYGAGLLSSFGELQYCLSEKPKLLPLELEKTAIQN | |
| | YTVTEFQPLYYVAESFNDAKEKVRNFAATIPRPFSVRYDPYTQRIEV | |
| | LDNTQQLKILADSINSEIGILCSALQKIK | |
| 79 | MAKTLSQAQSKTSSQQFSFTGNSSANVIIGNQKLTINDVARVARNGT | PAL |
| | LVSLTNNTDILQGIQASCDYINNAVESGEPIYGVTSGFGGMANVAIS | |
| | REQASELQTNLVWFLKTGAGNKLPLADVRAAMLLRANSHMRGAS | |
| | GIRLELIKRMEIFLNAGVTPYVYEFGSIGASGDLVPLSYITGSLIGLDP | |
| | SFKVDFNGKEMDAPTALRQLNLSPLTLLPKEGLAMMNGTSVMTGI | |
| | AANCVYDTQILTAIAMGVHALDIQALNGTNQSFHPFIHNSKPHPGQL | |
| | WAADQMISLLANS | |
| | QLVRDELDGKHDYRDHELIQDRYSLRCLPQYLGPIVDGISQIAKQIEI | |
| | EINSVTDNPLIDVDNQASYHGGNFLGQYVGMGMDHLRYYIGLLAK | |
| | HLDVQIALLASPEFSNGLPPSLLGNRERKVNMGLKGLQICGNSIMPL | |
| | LTFYGNSIADRFPTHAEQFNQNINSQGYTSATLARRSVDIFQNYVAI | |
| | ALMFGVQAVDLRTYKKTGHYDARASLSPATERLYSAVRHVVGQKP | |
| | TSDRPYIWNDNEQGLDEHIARISADIAAGGVIVQAVQDILPSLH | |
| 80 | MSTERDSETTFDEDSQPNDEVVPYSDDETEDELDDQGSAVEPEQNR | ATP8B1 |
| | VNREAEENREPFRKECTWQVKANDRKYHEQPHFMNTKFLCIKESK | |
| | YANNAIKTYKYNAFTFIPMNLFEQFKRAANLYFLALLILQAVPQIST | |
| | LAWYTTLVPLLVVLGVTAIKDLVDDVARHKMDKEINNRTCEVIKD | |
| | GRFKVAKWKEIQVGDVIRLKKNDFVPADILLLSSSEPNSLCYVETAE | |
| | LDGETNLKFKMSLEITDQYLQREDTLATFDGFIECEEPNNRLDKFTG | |
| | TLFWRNTSFPLDADKILLRGCVIRNTDFCHGLVIFAGADTKIMKNSG | |
| | KTRFKRTKIDYLMNYMVYTIFVVLILLSAGLAIGHAYWEAQVGNSS | |
| | WYLYDGEDDTPSYRGFLIFWGYIIVLNTMVPISLYVSVEVIRLGQSH | |
| | FINWDLQMYYAEKDTPAKARTTTLNEQLGQIHYIFSDKTGTLTQNI | |
| | MTFKKCCINGQIYGDHRDASQHNHNKIEQVDFSWNTYADGKLAFY | |
| | DHYLIEQIQSGKEPEVRQFFFLLAVCHTVMVDRTDGQLNYQAASPD | |
| | EGALVNAARNFGFAFLARTQNTITISELGTERTYNVLAILDFNSDRK | |
| | RMSIIVRTPEGNIKLYCKGADTVIYERLHRMNPTKQETQDALDIFAN | |
| | ETLRTLCLCYKEIEEKEFTEWNKKFMAASVASTNRDEALDKVYEEI | |
| | EKDLILLGATAIEDKLQDGVPETISKLAKADIKIWVLTGDKKETAENI | |
| | GFACELLTEDTTICYGEDINSLLHARMENQRNRGGVYAKFAPPVQE | |
| | SFFPPGGNRALIITGSWLNEILLEKKTKRNKILKLKFPRTEEERRMRT | |
| | QSKRRLEAKKEQRQKNFVDLACECSAVICCRVTPKQKAMVVDLVK | |
| | RYKKAITLAIGDGANDVNMIKTAHIGVGISGQEGMQAVMSSDYSFA | |
| | QFRYLQRLLLVHGRWSYIRMCKFLRYFFYKNFAFTLVHFWYSFFNG | |
| | YSAQTAYEDWFITLYNVLYTSLPVLLMGLLDQDVSDKLSLRFPGLY | |
| | IVGQRDLLFNYKRFFVSLLHGVLTSMILFFIPLGAYLQTVGQDGEAP | |
| | SDYQSFAVTIASALVITVNFQIGLDTSYWTFVNAFSIFGSIALYFGIMF | |
| | DFHSAGIHVLFPSAFQFTGTASNALRQPYIWLTIILAVAVCLLPVVAI | |
| | RFLSMTIWPSESDKIQKHRKRLKAEEQWQRRQQVFRRGVSTRRSAY | |
| | AFSHQRGYADLISSGRSIRKKRSPLDAIVADGTAEYRRTGDS | |
| 81 | MSDSVILRSIKKFGEENDGFESDKSYNNDKKSRLQDEKKGDGVRVG | ABCB11 |
| | FFQLFRFSSSTDIWLMFVGSLCAFLHGIAQPGVLLIFGTMTDVFIDYD | |
| | VELQELQIPGKACVNNTIVWTNSSLNQNMTNGTRCGLLNIESEMIKF | |
| | ASYYAGIAVAVLITGYIQICFWVIAAARQIQKMRKFYFRRIMRMEIG | |
| | WFDCNSVGELNTRFSDDINKINDAIADQMALFIQRMTSTICGFLLGF | |
| | FRGWKLTLVIISVSPLIGIGAATIGLSVSKFTDYELKAYAKAGVVAD | |
| | EVISSMRTVAAFGGEKREVERYEKNLVFAQRWGIRKGIVMGFFTGF | |
| | VWCLIFLCYALAFWYGSTLVLDEGEYTPGTLVQIFLSVIVGALNLGN | |
| | ASPCLEAFATGRAAATSIFETIDRKPIIDCMSEDGYKLDRIKGEIEFHN | |
| | VTFHYPSRPEVKILNDLNMVIKPGEMTALVGPSGAGKSTALQLIQRF | |
| | YDPCEGMVTVDGHDIRSLNIQWLRDQIGIVEQEPVLFSTTIAENIRYG | |
| | REDATMEDIVQAAKEANAYNFIMDLPQQFDTLVGEGGGQMSGGQ | |
| | KQRVAIARALIRNPKILLLDMATSALDNESEAMVQEVLSKIQHGHTII | |
| | SVAHRLSTVRAADTIIGFEHGTAVERGTHEELLERKGVYFTLVTLQS | |
| | QGNQALNEEDIKDATEDDMLARTFSRGSYQDSLRASIRQRSKSQLS | |
| | YLVHEPPLAVVDHKSTYEEDRKDKDIPVQEEVEPAPVRRILKFSAPE | |
| | WPYMLVGSVGAAVNGTVTPLYAFLFSQILGTFSIPDKEEQRSQINGV | |
| | CLLFVAMGCVSLFTQFLQGYAFAKSGELLTKRLRKFGFRAMLGQDI | |
| | AWFDDLRNSPGALTTRLATDASQVQGAAGSQIGMIVNSFTNVTVA | |
| | MIIAFSFSWKLSLVILCFFPFLALSGATQTRMLTGFASRDKQALEMV | |
| | GQITNEALSNIRTVAGIGKERRHEALETELEKPFKTAIQKANIYGFCF | |
| | AFAQCIMFIANSASYRYGGYLISNEGLHFSYVFRVISAVVLSATALG | |
| | RAFSYTPSYAKAKISAARFFQLLDRQPPISVYNTAGEKWDNFQGKID | |
| | FVDCKFTYPSRPDSQVLNGLSVSISPGQTLAFVGSSGCGKSTSIQLLE | |
| | RFYDPDQGKVMIDGHDSKKVNVQFLRSNIGIVSQEPVLFACSIMDNI | |
| | KYGDNTKEIPMERVIAAAKQAQLHDFVMSLPEKYETNVGSQGSQLS | |
| | RGEKQRIAIARAIVRDPKILLLDEATSALDTESEKTVQVALDKAREG | |
| | RTCIVIAHRLSTIQNADIIAVMAQGVVIEKGTHEELMAQKGAYYKLV | |
| | TTGSPIS | |
| 82 | MDLEAAKNGTAWRPTSAEGDFELGISSKQKRKKTKTVKMIGVLTLF | ABCB4 |
| | RYSDWQDKLFMSLGTIMAIAHGSGLPLMMIVFGEMTDKFVDTAGN | |
| | FSFPVNFSLSLLNPGKILEEEMTRYAYYYSGLGAGVLVAAYIQVSFW | |
| | TLAAGRQIRKIRQKFFHAILRQEIGWFDINDTTELNTRLTDDISKISEG | |
| | IGDKVGMFFQAVATFFAGFIVGFIRGWKLTLVIMAISPILGLSAAVW | |
| | AKILSAFSDKELAAYAKAGAVAEEALGAIRTVIAFGGQNKELERYQ | |
| | KHLENAKEIGIKKAISANISMGIAFLLIYASYALAFWYGSTLVISKEY | |
| | TIGNAMTVFFSILIGAFSVGQAAPCIDAFANARGAAYVIFDIIDNNPKI | |
| | DSFSERGHKPDSIKGNLEFNDVHFSYPSRANVKILKGLNLKVQSGQT | |
| | VALVGSSGCGKSTTVQLIQRLYDPDEGTINIDGQDIRNFNVNYLREII | |
| | GVVSQEPVLFSTTIAENICYGRGNVTMDEIKKAVKEANAYEFIMKLP | |
| | QKFDTLVGERGAQLSGGQKQRIAIARALVRNPKILLLDEATSALDTE | |
| | SEAEVQAALDKAREGRTTIVIAHRLSTVRNADVIAGFEDGVIVEQGS | |
| | HSELMKKEGVYFKLVNMQTSGSQIQSEEFELNDEKAATRMAPNGW | |
| | KSRLFRHSTQKNLKNSQMCQKSLDVETDGLEANVPPVSFLKVLKLN | |
| | KTEWPYFVVGTVCAIANGGLQPAFSVIFSEIIAIFGPGDDAVKQQKC | |
| | NIFSLIFLFLGIISFFTFFLQGFTFGKAGEILTRRLRSMAFKAMLRQDM | |
| | SWFDDHKNSTGALSTRLATDAAQVQGATGTRLALIAQNIANLGTGII | |
| | ISFIYGWQLTLLLLAVVPIIAVSGIVEMKLLAGNAKRDKKELEAAGK | |
| | IATEAIENIRTVVSLTQERKFESMYVEKLYGPYRNSVQKAHIYGITFS | |
| | ISQAFMYFSYAGCFRFGAYLIVNGHMRFRDVILVFSAIVFGAVALGH | |
| | ASSFAPDYAKAKLSAAHLFMLFERQPLIDSYSEEGLKPDKFEGNITF | |
| | NEVVFNYPTRANVPVLQGLSLEVKKGQTLALVGSSGCGKSTVVQL | |
| | LERFYDPLAGTVFVDFGFQLLDGQEAKKLNVQWLRAQLGIVSQEPI | |
| | LFDCSIAENIAYGDNSRVVSQDEIVSAAKAANIHPFIETLPHKYETRV | |
| | GDKGTQLSGGQKQRIAIARALIRQPQILLLDEATSALDTESEKVVQE | |
| | ALDKAREGRTCIVIAHRLSTIQNADLIVVFQNGRVKEHGTHQQLLA | |
| | QKGIYFSMVSVQAGTQNL | |
| 83 | MPVRGDRGFPPRRELSGWLRAPGMEELIWEQYTVTLQKDSKRGFGI | TJP2 |
| | AVSGGRDNPHFENGETSIVISDVLPGGPADGLLQENDRVVMVNGTP | |
| | MEDVLHSFAVQQLRKSGKVAAIVVKRPRKVQVAALQASPPLDQDD | |
| | RAFEVMDEFDGRSFRSGYSERSRLNSHGGRSRSWEDSPERGRPHER | |
| | ARSRERDLSRDRSRGRSLERGLDQDHARTRDRSRGRSLERGLDHDF | |
| | GPSRDRDRDRSRGRSIDQDYERAYHRAYDPDYERAYSPEYRRGAR | |
| | HDARSRGPRSRSREHPHSRSPSPEPRGRPGPIGVLLMKSRANEEYGL | |
| | RLGSQIFVKEMTRTGLATKDGNLHEGDIILKINGTVTENMSLTDARK | |
| | LIEKSRGKLQLVVLRDSQQTLINIPSLNDSDSEIEDISEIESNRSFSPEE | |
| | RRHQYSDYDYHSSSEKLKERPSSREDTPSRLSRMGATPTPFKSTGDI | |
| | AGTVVPETNKEPRYQEDPPAPQPKAAPRTFLRPSPEDEAIYGPNTKM | |
| | VRFKKGDSVGLRLAGGNDVGIFVAGIQEGTSAEQEGLQEGDQILKV | |
| | NTQDFRGLVREDAVLYLLEIPKGEMVTILAQSRADVYRDILACGRG | |
| | DSFFIRSHFECEKETPQSLAFTRGEVFRVVDTLYDGKLGNWLAVRIG | |
| | NELEKGLIPNKSRAEQMASVQNAQRDNAGDRADFWRMRGQRSGV | |
| | KKNLRKSREDLTAVVSVSTKFPAYERVLLREAGFKRPVVLFGPIADI | |
| | AMEKLANELPDWFQTAKTEPKDAGSEKSTGVVRLNTVRQIIEQDKH | |
| | ALLDVTPKAVDLLNYTQWFPIVIFFNPDSRQGVKTMRQRLNPTSNK | |
| | SSRKLFDQANKLKKTCAHLFTATINLNSANDSWFGSLKDTIQHQQG | |
| | EAVWVSEGKMEGMDDDPEDRMSYLTAMGADYLSCDSRLISDFEDT | |
| | DGEGGAYTDNELDEPAEEPLVSSITRSSEPVQHEESIRKPSPEPRAQM | |
| | RRAASSDQLRDNSPPPAFKPEPPKAKTQNKEESYDFSKSYEYKSNPS | |
| | AVAGNETPGASTKGYPPPVAAKPTFGRSILKPSTPIPPQEGEEVGESS | |
| | EEQDNAPKSVLGKVKIFEKMDHKARLQRMQELQEAQNARIEIAQK | |
| | HPDIYAVPIKTHKPDPGTPQHTSSRPPEPQKAPSRPYQDTRGSYGSD | |
| | AEEEEYRQQLSEHSKRGYYGQSARYRDTEL | |
| 84 | MATATRLLGWRVASWRLRPPLAGFVSQRAHSLLPVDDAINGLSEE | IVD |
| | QRQLRQTMAKFLQEHLAPKAQEIDRSNEFKNLREFWKQLGNLGVL | |
| | GITAPVQYGGSGLGYLEHVLVMEEISRASGAVGLSYGAHSNLCINQ | |
| | LVRNGNEAQKEKYLPKLISGEYIGALAMSEPNAGSDVVSMKLKAE | |
| | KKGNHYILNGNKFWITNGPDADVLIVYAKTDLAAVPASRGITAFIVE | |
| | KGMPGFSTSKKLDKLGMRGSNTCELIFEDCKIPAANILGHENKGVY | |
| | VLMSGLDLERLVLAGGPLGLMQAVLDHTIPYLHVREAFGQKIGHFQ | |
| | LMQGKMADMYTRLMACRQYVYNVAKACDEGHCTAKDCAGVILY | |
| | SAECATQVALDGIQCFGGNGYINDFPMGRFLRDAKLYEIGAGTSEV | |
| | RRLVIGRAFNADFH | |
| 85 | MALRGVSVRLLSRGPGLHVLRTWVSSAAQTEKGGRTQSQLAKSSR | GCDH |
| | PEFDWQDPLVLEEQLTTDEILIRDTFRTYCQERLMPRILLANRNEVF | |
| | HREIISEMGELGVLGPTIKGYGCAGVSSVAYGLLARELERVDSGYRS | |
| | AMSVQSSLVMHPIYAYGSEEQRQKYLPQLAKGELLGCFGLTEPNSG | |
| | SDPSSMETRAHYNSSNKSYTLNGTKTWITNSPMADLFVVWARCED | |
| | GCIRGFLLEKGMRGLSAPRIQGKFSLRASATGMIIMDGVEVPEENVL | |
| | PGASSLGGPFGCLNNARYGIAWGVLGASEFCLHTARQYALDRMQF | |
| | GVPLARNQLIQKKLADMLTEITLGLHACLQLGRLKDQDKAAPEMV | |
| | SLLKRNNCGKALDIARQARDMLGGNGISDEYHVIRHAMNLEAVNT | |
| | YEGTHDIHALILGRAITGIQAFTASK | |
| 86 | MFRAAAPGQLRRAASLLRFQSTLVIAEHANDSLAPITLNTITAATRL | ETFA |
| | GGEVSCLVAGTKCDKVAQDLCKVAGIAKVLVAQHDVYKGLLPEEL | |
| | TPLILATQKQFNYTHICAGASAFGKNLLPRVAAKLEVAPISDHAIKSP | |
| | DTFVRTIYAGNALCTVKCDEKVKVFSVRGTSFDAAATSGGSASSEK | |
| | ASSTSPVEISEWLDQKLTKSDRPELTGAKVVVSGGRGLKSGENFKLL | |
| | YDLADQLHAAVGASRAAVDAGFVPNDMQVGQTGKIVAPELYIAV | |
| | GISGAIQHLAGMKDSKTIVAINKDPEAPIFQVADYGIVADLFKVVPE | |
| | MTEILKKK | |
| 87 | MAELRVLVAVKRVIDYAVKIRVKPDRTGVVTDGVKHSMNPFCEIA | ETFB |
| | VEEAVRLKEKKLVKEVIAVSCGPAQCQETIRTALAMGADRGIHVEV | |
| | PPAEAERLGPLQVARVLAKLAEKEKVDLVLLGKQAIDDDCNQTGQ | |
| | MTAGFLDWPQGTFASQVTLEGDKLKVEREIDGGLETLRLKLPAVVT | |
| | ADLRLNEPRYATLPNIMKAKKKKIEVIKPGDLGVDLTSKLSVISVED | |
| | PPQRTAGVKVETTEDLVAKLKEIGRI | |
| 88 | MLVPLAKLSCLAYQCFHALKIKKNYLPLCATRWSSTSTVPRITTHYT | ETFDH |
| | IYPRDKDKRWEGVNMERFAEEADVVIVGAGPAGLSAAVRLKQLAV | |
| | AHEKDIRVCLVEKAAQIGAHTLSGACLDPGAFKELFPDWKEKGAPL | |
| | NTPVTEDRFGILTEKYRIPVPILPGLPMNNHGNYIVRLGHLVSWMGE | |
| | QAEALGVEVYPGYAAAEVLFHDDGSVKGIATNDVGIQKDGAPKAT | |
| | FERGLELHAKVTIFAEGCHGHLAKQLYKKFDLRANCEPQTYGIGLK | |
| | ELWVIDEKNWKPGRVDHTVGWPLDRHTYGGSFLYHLNEGEPLVAL | |
| | GLVVGLDYQNPYLSPFREFQRWKHHPSIRPTLEGGKRIAYGARALN | |
| | EGGFQSIPKLTFPGGLLIGCSPGFMNVPKIKGTHTAMKSGILAAESIF | |
| | NQLTSENLQSKTIGLHVTEYEDNLKNSWVWKELYSVRNIRPSCHGV | |
| | LGVYGGMIYTGIFYWILRGMEPWTLKHKGSDFERLKPAKDCTPIEY | |
| | PKPDGQISFDLLSSVALSGTNHEHDQPAHLTLRDDSIPVNRNLSIYDG | |
| | PEQRFCPAGVYEFVPVEQGDGFRLQINAQNCVHCKTCDIKDPSQNIN | |
| | WVVPEGGGGPAYNGM | |
| 89 | MASESGKLWGGRFVGAVDPIMEKFNASIAYDRHLWEVDVQGSKA | ASL |
| | YSRGLEKAGLLTKAEMDQILHGLDKVAEEWAQGTFKLNSNDEDIH | |
| | TANERRLKELIGATAGKLHTGRSRNDQVVTDLRLWMRQTCSTLSG | |
| | LLWELIRTMVDRAEAERDVLFPGYTHLQRAQPIRWSHWILSHAVAL | |
| | TRDSERLLEVRKRINVLPLGSGAIAGNPLGVDRELLRAELNFGAITL | |
| | NSMDATSERDFVAEFLFWASLCMTHLSRMAEDLILYCTKEFSFVQL | |
| | SDAYSTGSSLMPQKKNPDSLELIRSKAGRVFGRCAGLLMTLKGLPS | |
| | TYNKDLQEDKEAVFEVSDTMSAVLQVATGVISTLQIHQENMGQAL | |
| | SPDMLATDLAYYLVRKGMPFRQAHEASGKAVFMAETKGVALNQL | |
| | SLQELQTISPLFSGDVICVWDYGHSVEQYGALGGTARSSVDWQIRQ | |
| | VRALLQAQQA | |
| 90 | MVGGSVPVFDEIILSTARMNRVLSFHSVSGILVCQAGCVLEELSRYV | D2HGDH |
| | EERDFIMPLDLGAKGSCHIGGNVATNAGGLRFLRYGSLHGTVLGLE | |
| | VVLADGTVLDCLTSLRKDNTGYDLKQLFIGSEGTLGIITTVSILCPPK | |
| | PRAVNVAFLGCPGFAEVLQTFSTCKGMLGEILSAFEFMDAVCMQLV | |
| | GRHLHLASPVQESPFYVLIETSGSNAGHDAEKLGHFLEHALGSGLVT | |
| | DGTMATDQRKVKMLWALRERITEALSRDGYVYKYDLSLPVERLYD | |
| | IVTDLRARLGPHAKHVVGYGHLGDGNLHLNVTAEAFSPSLLAALEP | |
| | HVYEWTAGQQGSVSAEHGVGFRKRDVLGYSKPPGALQLMQQLKA | |
| | LLDPKGILNPYKTLPSQA | |
| 91 | MAAMRKALPRRLVGLASLRAVSTSSMGTLPKRVKIVEVGPRDGLQ | HMGCL |
| | NEKNIVSTPVKIKLIDMLSEAGLSVIETTSFVSPKWVPQMGDHTEVL | |
| | KGIQKFPGINYPVLTPNLKGFEAAVAAGAKEVVIFGAASELFTKKNI | |
| | NCSIEESFQRFDAILKAAQSANISVRGYVSCALGCPYEGKISPAKVAE | |
| | VTKKFYSMGCYEISLGDTIGVGTPGIMKDMLSAVMQEVPLAALAV | |
| | HCHDTYGQALANTLMALQMGVSVVDSSVAGLGGCPYAQGASGNL | |
| | ATEDLVYMLEGLGIHTGVNLQKLLEAGNFICQALNRKTSSKVAQAT | |
| | CKL | |
| 92 | MAAASAVSVLLVAAERNRWHRLPSLLLPPRTWVWRQRTMKYTTA | MCCC1 |
| | TGRNITKVLIANRGEIACRVMRTAKKLGVQTVAVYSEADRNSMHV | |
| | DMADEAYSIGPAPSQQSYLSMEKIIQVAKTSAAQAIHPGCGFLSENM | |
| | EFAELCKQEGIIFIGPPPSAIRDMGIKSTSKSIMAAAGVPVVEGYHGE | |
| | DQSDQCLKEHARRIGYPVMIKAVRGGGGKGMRIVRSEQEFQEQLES | |
| | ARREAKKSFNDDAMLIEKFVDTPRHVEVQVFGDHHGNAVYLFERD | |
| | CSVQRRHQKIIEEAPAPGIKSEVRKKLGEAAVRAAKAVNYVGAGTV | |
| | EFIMDSKHNFCFMEMNTRLQVEHPVTEMITGTDLVEWQLRIAAGEK | |
| | IPLSQEEITLQGHAFEARIYAEDPSNNFMPVAGPLVHLSTPRADPSTR | |
| | IETGVRQGDEVSVHYDPMIAKLVVWAADRQAALTKLRYSLRQYNI | |
| | VGLHTNIDFLLNLSGHPEFEAGNVHTDFIPQHHKQLLLSRKAAAKES | |
| | LCQAALGLILKEKAMTDTFTLQAHDQFSPFSSSSGRRLNISYTRNMT | |
| | LKDGKNNVAIAVTYNHDGSYSMQIEDKTFQVLGNLYSEGDCTYLK | |
| | CSVNGVASKAKLIILENTIYLFSKEGSIEIDIPVPKYLSSVSSQETQGG | |
| | PLAPMTGTIEKVFVKAGDKVKAGDSLMVMIAMKMEHTIKSPKDGT | |
| | VKKVFYREGAQANRHTPLVEFEEEESDKRESE | |
| 93 | MWAVLRLALRPCARASPAGPRAYHGDSVASLGTQPDLGSALYQEN | MCCC2 |
| | YKQMKALVNQLHERVEHIKLGGGEKARALHISRGKLLPRERIDNLI | |
| | DPGSPFLELSQFAGYQLYDNEEVPGGGIITGIGRVSGVECMIIANDAT | |
| | VKGGAYYPVTVKKQLRAQEIAMQNRLPCIYLVDSGGAYLPRQADV | |
| | FPDRDHFGRTFYNQAIMSSKNIAQIAVVMGSCTAGGAYVPAMADE | |
| | NIIVRKQGTIFLAGPPLVKAATGEEVSAEDLGGADLHCRKSGVSDH | |
| | WALDDHHALHLTRKVVRNLNYQKKLDVTIEPSEEPLFPADELYGIV | |
| | GANLKRSFDVREVIARIVDGSRFTEFKAFYGDTLVTGFARIFGYPVGI | |
| | VGNNGVLFSESAKKGTHFVQLCCQRNIPLLFLQNITGFMVGREYEA | |
| | EGIAKDGAKMVAAVACAQVPKITLIIGGSYGAGNYGMCGRAYSPR | |
| | FLYIWPNARISVMGGEQAANVLATITKDQRAREGKQFSSADEAALK | |
| | EPIIKKFEEEGNPYYSSARVWDDGIIDPADTRLVLGLSFSAALNAPIE | |
| | KTDFGIFRM | |
| 94 | MAVAGPAPGAGARPRLDLQFLQRFLQILKVLFPSWSSQNALMFLTL | ABCD4 |
| | LCLTLLEQFVIYQVGLIPSQYYGVLGNKDLEGFKTLTFLAVMLIVLN | |
| | STLKSFDQFTCNLLYVSWRKDLTEHLHRLYFRGRAYYTLNVLRDDI | |
| | DNPDQRISQDVERFCRQLSSMASKLIISPFTLVYYTYQCFQSTGWLG | |
| | PVSIFGYFILGTVVNKTLMGPIVMKLVHQEKLEGDFRFKHMQIRVN | |
| | AEPAAFYRAGHVEHMRTDRRLQRLLQTQRELMSKELWLYIGINTFD | |
| | YLGSILSYVVIAIPIFSGVYGDLSPAELSTLVSKNAFVCIYLISCFTQLI | |
| | DLSTTLSDVAGYTHRIGQLRETLLDMSLKSQDCEILGESEWGLDTPP | |
| | GWPAAEPADTAFLLERVSISAPSSDKPLIKDLSLKISEGQSLLITGNTG | |
| | TGKTSLLRVLGGLWTSTRGSVQMLTDFGPHGVLFLPQKPFFTDGTL | |
| | REQVIYPLKEVYPDSGSADDERILRFLELAGLSNLVARTEGLDQQVD | |
| | WNWYDVLSPGEMQRLSFARLFYLQPKYAVLDEATSALTEEVESEL | |
| | YRIGQQLGMTFISVGHRQSLEKFHSLVLKLCGGGRWELMRIKVE | |
| 95 | MASAVSPANLPAVLLQPRWKRVVGWSGPVPRPRHGHRAVAIKELI | HCFC1 |
| | VVFGGGNEGIVDELHVYNTATNQWFIPAVRGDIPPGCAAYGFVCDG | |
| | TRLLVFGGMVEYGKYSNDLYELQASRWEWKRLKAKTPKNGPPPCP | |
| | RLGHSFSLVGNKCYLFGGLANDSEDPKNNIPRYLNDLYILELRPGSG | |
| | VVAWDIPITYGVLPPPRESHTAVVYTEKDNKKSKLVIYGGMSGCRL | |
| | GDLWTLDIDTLTWNKPSLSGVAPLPRSLHSATTIGNKMYVFGGWVP | |
| | LVMDDVKVATHEKEWKCTNTLACLNLDTMAWETILMDTLEDNIPR | |
| | ARAGHCAVAINTRLYIWSGRDGYRKAWNNQVCCKDLWYLETEKP | |
| | PPPARVQLVRANTNSLEVSWGAVATADSYLLQLQKYDIPATAATAT | |
| | SPTPNPVPSVPANPPKSPAPAAAAPAVQPLTQVGITLLPQAAPAPPTT | |
| | TTIQVLPTVPGSSISVPTAARTQGVPAVLKVTGPQATTGTPLVTMRP | |
| | ASQAGKAPVTVTSLPAGVRMVVPTQSAQGTVIGSSPQMSGMAALA | |
| | AAAAATQKIPPSSAPTVLSVPAGTTIVKTMAVTPGTTTLPATVKVAS | |
| | SPVMVSNPATRMLKTAAAQVGTSVSSATNTSTRPIITVHKSGTVTV | |
| | AQQAQVVTTVVGGVTKTITLVKSPISVPGGSALISNLGKVMSVVQT | |
| | KPVQTSAVTGQASTGPVTQIIQTKGPLPAGTILKLVTSADGKPTTIITT | |
| | TQASGAGTKPTILGISSVSPSTTKPGTTTIIKTIPMSAIITQAGATGVTS | |
| | SPGIKSPITIITTKVMTSGTGAPAKIITAVPKIATGHGQQGVTQVVLK | |
| | GAPGQPGTILRTVPMGGVRLVTPVTVSAVKPAVTTLVVKGTTGVTT | |
| | LGTVTGTVSTSLAGAGGHSTSASLATPITTLGTIATLSSQVINPTAITV | |
| | SAAQTTLTAAGGLTTPTITMQPVSQPTQVTLITAPSGVEAQPVHDLP | |
| | VSILASPTTEQPTATVTIADSGQGDVQPGTVTLVCSNPPCETHETGTT | |
| | NTATTTVVANLGGHPQPTQVQFVCDRQEAAASLVTSTVGQQNGSV | |
| | VRVCSNPPCETHETGTTNTATTATSNMAGQHGCSNPPCETHETGTT | |
| | NTATTAMSSVGANHQRDARRACAAGTPAVIRISVATGALEAAQGS | |
| | KSQCQTRQTSATSTTMTVMATGAPCSAGPLLGPSMAREPGGRSPAF | |
| | VQLAPLSSKVRLSSPSIKDLPAGRHSHAVSTAAMTRSSVGAGEPRM | |
| | APVCESLQGGSPSTTVTVTALEALLCPSATVTQVCSNPPCETHETGT | |
| | TNTATTSNAGSAQRVCSNPPCETHETGTTHTATTATSNGGTGQPEG | |
| | GQQPPAGRPCETHQTTSTGTTMSVSVGALLPDATSSHRTVESGLEV | |
| | AAAPSVTPQAGTALLAPFPTQRVCSNPPCETHETGTTHTATTVTSN | |
| | MSSNQDPPPAASDQGEVESTQGDSVNITSSSAITTTVSSTLTRAVTTV | |
| | TQSTPVPGPSVPPPEELQVSPGPRQQLPPRQLLQSASTALMGESAEV | |
| | LSASQTPELPAAVDLSSTGEPSSGQESAGSAVVATVVVQPPPPTQSE | |
| | VDQLSLPQELMAEAQAGTTTLMVTGLTPEELAVTAAAEAAAQAAA | |
| | TEEAQALAIQAVLQAAQQAVMGTGEPMDTSEAAATVTQAELGHLS | |
| | AEGQEGQATTIPIVLTQQELAALVQQQQLQEAQAQQQHHHLPTEAL | |
| | APADSLNDPAIESNCLNELAGTVPSTVALLPSTATESLAPSNTFVAPQ | |
| | PVVVASPAKLQAAATLTEVANGIESLGVKPDLPPPPSKAPMKKENQ | |
| | WFDVGVIKGTNVMVTHYFLPPDDAVPSDDDLGTVPDYNQLKKQEL | |
| | QPGTAYKFRVAGINACGRGPFSEISAFKTCLPGFPGAPCAIKISKSPD | |
| | GAHLTWEPPSVTSGKIIEYSVYLAIQSSQAGGELKSSTPAQLAFMRV | |
| | YCGPSPSCLVQSSSLSNAHIDYTTKPAIIFRIAARNEKGYGPATQVRW | |
| | LQETSKDSSGTKPANKRPMSSPEMKSAPKKSKADGQ | |
| 96 | MATSGAASAELVIGWCIFGLLLLAILAFCWIYVRKYQSRRESEVVST | LMBRD1 |
| | ITAIFSLAIALITSALLPVDIFLVSYMKNQNGTFKDWANANVSRQIED | |
| | TVLYGYYTLYSVILFCVFFWIPFVYFYYEEKDDDDTSKCTQIKTALK | |
| | YTLGFVVICALLLLVGAFVPLNVPNNKNSTEWEKVKSLFEELGSSH | |
| | GLAALSFSISSLTLIGMLAAITYTAYGMSALPLNLIKGTRSAAYERLE | |
| | NTEDIEEVEQHIQTIKSKSKDGRPLPARDKRALKQFEERLRTLKKRE | |
| | RHLEFIENSWWTKFCGALRPLKIVWGIFFILVALLFVISLFLSNLDKA | |
| | LHSAGIDSGFIIFGANLSNPLNMLLPLLQTVFPLDYILITIIIMYFIFTSM | |
| | AGIRNIGIWFFWIRLYKIRRGRTRPQALLFLCMILLLIVLHTSYMIYSL | |
| | APQYVMYGSQNYLIETNITSDNHKGNSTLSVPKRCDADAPEDQCTV | |
| | TRTYLFLHKFWFFSAAYYFGNWAFLGVFLIGLIVSCCKGKKSVIEGV | |
| | DEDSDISDDEPSVYSA | |
| 97 | MSAKSRTIGIIGAPFSKGQPRGGVEEGPTVLRKAGLLEKLKEQECDV | ARG1 |
| | KDYGDLPFADIPNDSPFQIVKNPRSVGKASEQLAGKVAEVKKNGRIS | |
| | LVLGGDHSLAIGSISGHARVHPDLGVIWVDAHTDINTPLTTTSGNLH | |
| | GQPVSFLLKELKGKIPDVPGFSWVTPCISAKDIVYIGLRDVDPGEHYI | |
| | LKTLGIKYFSMTEVDRLGIGKVMEETLSYLLGRKKRPIHLSFDVDGL | |
| | DPSFTPATGTPVVGGLTYREGLYITEEIYKTGLLSGLDIMEVNPSLGK | |
| | TPEEVTRTVNTAVAITLACFGLAREGNHKPIDYLNPPK | |
| 98 | MKSNPAIQAAIDLTAGAAGGTACVLTGQPFDTMKVKMQTFPDLYR | SLC25A15 |
| | GLTDCCLKTYSQVGFRGFYKGTSPALIANIAENSVLFMCYGFCQQV | |
| | VRKVAGLDKQAKLSDLQNAAAGSFASAFAALVLCPTELVKCRLQT | |
| | MYEMETSGKIAKSQNTVWSVIKSILRKDGPLGFYHGLSSTLLREVPG | |
| | YFFFFGGYELSRSFFASGRSKDELGPVPLMLSGGVGGICLWLAVYPV | |
| | DCIKSRIQVLSMSGKQAGFIRTFINVVKNEGITALYSGLKPTMIRAFP | |
| | ANGALFLAYEYSRKLMMNQLEAY | |
| 99 | MAAAKVALTKRADPAELRTIFLKYASIEKNGEFFMSPNDFVTRYLNI | SLC25A13 |
| | FGESQPNPKTVELLSGVVDQTKDGLISFQEFVAFESVLCAPDALFMV | |
| | AFQLFDKAGKGEVTFEDVKQVFGQTTIHQHIPFNWDSEFVQLHFGK | |
| | ERKRHLTYAEFTQFLLEIQLEHAKQAFVQRDNARTGRVTAIDFRDI | |
| | MVTIRPHVLTPFVEECLVAAAGGTTSHQVSFSYFNGFNSLLNNMELI | |
| | RKIYSTLAGTRKDVEVTKEEFVLAAQKFGQVTPMEVDILFQLADLY | |
| | EPRGRMTLADIERIAPLEEGTLPFNLAEAQRQKASGDSARPVLLQVA | |
| | ESAYRFGLGSVAGAVGATAVYPIDLVKTRMQNQRSTGSFVGELMY | |
| | KNSFDCFKKVLRYEGFFGLYRGLLPQLLGVAPEKAIKLTVNDFVRD | |
| | KFMHKDGSVPLAAEILAGGCAGGSQVIFTNPLEIVKIRLQVAGEITT | |
| | GPRVSALSVVRDLGFFGIYKGAKACFLRDIPFSAIYFPCYAHVKASF | |
| | ANEDGQVSPGSLLLAGAIAGMPAASLVTPADVIKTRLQVAARAGQT | |
| | TYSGVIDCFRKILREEGPKALWKGAGARVFRSSPQFGVTLLTYELLQ | |
| | RWFYIDFGGVKPMGSEPVPKSRINLPAPNPDHVGGYKLAVATFAGI | |
| | ENKFGLYLPLFKPSVSTSKAIGGGP | |
| 100 | MQPQSVLHSGYFHPLLRAWQTATTTLNASNLIYPIFVTDVPDDIQPIT | ALAD |
| | SLPGVARYGVKRLEEMLRPLVEEGLRCVLIFGVPSRVPKDERGSAA | |
| | DSEESPAIEAIHLLRKTFPNLLVACDVCLCPYTSHGHCGLLSENGAF | |
| | RAEESRQRLAEVALAYAKAGCQVVAPSDMMDGRVEAIKEALMAH | |
| | GLGNRVSVMSYSAKFASCFYGPFRDAAKSSPAFGDRRCYQLPPGAR | |
| | GLALRAVDRDVREGADMLMVKPGMPYLDIVREVKDKHPDLPLAV | |
| | YHVSGEFAMLWHGAQAGAFDLKAAVLEAMTAFRRAGADIIITYYT | |
| | PQLLQWLKEE | |
| 101 | MALQLGRLSSGPCWLVARGGCGGPRAWSQCGGGGLRAWSQRSAA | CPOX |
| | GRVCRPPGPAGTEQSRGLGHGSTSRGGPWVGTGLAAALAGLVGLA | |
| | TAAFGHVQRAEMLPKTSGTRATSLGRPEEEEDELAHRCSSFMAPPV | |
| | TDLGELRRRPGDMKTKMELLILETQAQVCQALAQVDGGANFSVDR | |
| | WERKEGGGGISCVLQDGCVFEKAGVSISVVHGNLSEEAAKQMRSR | |
| | GKVLKTKDGKLPFCAMGVSSVIHPKNPHAPTIHFNYRYFEVEEADG | |
| | NKQWWFGGGCDLTPTYLNQEDAVHFHRTLKEACDQHGPDLYPKF | |
| | KKWCDDYFFIAHRGERRGIGGIFFDDLDSPSKEEVFRFVQSCARAVV | |
| | PSYIPLVKKHCDDSFTPQEKLWQQLRRGRYVEFNLLYDRGTKFGLF | |
| | TPGSRIESILMSLPLTARWEYMHSPSENSKEAEILEVLRHPRDWVR | |
| 102 | MSGNGNAAATAEENSPKMRVIRVGTRKSQLARIQTDSVVATLKAS | HMBS |
| | YPGLQFEIIAMSTTGDKILDTALSKIGEKSLFTKELEHALEKNEVDLV | |
| | VHSLKDLPTVLPPGFTIGAICKRENPHDAVVFHPKFVGKTLETLPEK | |
| | SVVGTSSLRRAAQLQRKFPHLEFRSIRGNLNTRLRKLDEQQEFSAIIL | |
| | ATAGLQRMGWHNRVGQILHPEECMYAVGQGALGVEVRAKDQDIL | |
| | DLVGVLHDPETLLRCIAERAFLRHLEGGCSVPVAVHTAMKDGQLY | |
| | LTGGVWSLDGSDSIQETMQATIHVPAQHEDGPEDDPQLVGITARNIP | |
| | RGPQLAAQNLGISLANLLLSKGAKNILDVARQLNDAH | |
| 103 | MGRTVVVLGGGISGLAASYHLSRAPCPPKVVLVESSERLGGWIRSV | PPOX |
| | RGPNGAIFELGPRGIRPAGALGARTLLLVSELGLDSEVLPVRGDHPA | |
| | AQNRFLYVGGALHALPTGLRGLLRPSPPFSKPLFWAGLRELTKPRG | |
| | KEPDETVHSFAQRRLGPEVASLAMDSLCRGVFAGNSRELSIRSCFPS | |
| | LFQAEQTHRSILLGLLLGAGRTPQPDSALIRQALAERWSQWSLRGG | |
| | LEMLPQALETHLTSRGVSVLRGQPVCGLSLQAEGRWKVSLRDSSLE | |
| | ADHVISAIPASVLSELLPAEAAPLARALSAITAVSVAVVNLQYQGAH | |
| | LPVQGFGHLVPSSEDPGVLGIVYDSVAFPEQDGSPPGLRVTVMLGG | |
| | SWLQTLEASGCVLSQELFQQRAQEAAATQLGLKEMPSHCLVHLHK | |
| | NCIPQYTLGHWQKLESARQFLTAHRLPLTLAGASYEGVAVNDCIES | |
| | GRQAAVSVLGTEPNS | |
| 104 | MAHAHIQGGRRAKSRFVVCIMSGARSKLALFLCGCYVVALGAHTG | BTD |
| | EESVADHHEAEYYVAAVYEHPSILSLNPLALISRQEALELMNQNLDI | |
| | YEQQVMTAAQKDVQIIVFPEDGIHGFNFTRTSIYPFLDFMPSPQVVR | |
| | WNPCLEPHRFNDTEVLQRLSCMAIRGDMFLVANLGTKEPCHSSDPR | |
| | CPKDGRYQFNTNVVFSNNGTLVDRYRKHNLYFEAAFDVPLKVDLIT | |
| | FDTPFAGRFGIFTCFDILFFDPAIRVLRDYKVKHVVYPTAWMNQLPL | |
| | LAAIEIQKAFAVAFGINVLAANVHHPVLGMTGSGIHTPLESFWYHD | |
| | MENPKSHLIIAQVAKNPVGLIGAENATGETDPSHSKFLKILSGDPYC | |
| | EKDAQEVHCDEATKWNVNAPPTFHSEMMYDNFTLVPVWGKEGYL | |
| | HVCSNGLCCYLLYERPTLSKELYALGVFDGLHTVHGTYYIQVCALV | |
| | RCGGLGFDTCGQEITEATGIFEFHLWGNFSTSYIFPLFLTSGMTLEVP | |
| | DQLGWENDHYFLRKSRLSSGLVTAALYGRLYERD | |
| 105 | MEDRLHMDNGLVPQKIVSVHLQDSTLKEVKDQVSNKQAQILEPKP | HLCS |
| | EPSLEIKPEQDGMEHVGRDDPKALGEEPKQRRGSASGSEPAGDSDR | |
| | GGGPVEHYHLHLSSCHECLELENSTIESVKFASAENIPDLPYDYSSSL | |
| | ESVADETSPEREGRRVNLTGKAPNILLYVGSDSQEALGRFHEVRSVL | |
| | ADCVDIDSYILYHLLEDSALRDPWTDNCLLLVIATRESIPEDLYQKF | |
| | MAYLSQGGKVLGLSSSFTFGGFQVTSKGALHKTVQNLVFSKADQSE | |
| | VKLSVLSSGCRYQEGPVRLSPGRLQGHLENEDKDRMIVHVPFGTRG | |
| | GEAVLCQVHLELPPSSNIVQTPEDFNLLKSSNFRRYEVLREILTTLGL | |
| | SCDMKQVPALTPLYLLSAAEEIRDPLMQWLGKHVDSEGEIKSGQLS | |
| | LRFVSSYVSEVEITPSCIPVVTNMEAFSSEHFNLEIYRQNLQTKQLGK | |
| | VILFAEVTPTTMRLLDGLMFQTPQEMGLIVIAARQTEGKGRGGNVW | |
| | LSPVGCALSTLLISIPLRSQLGQRIPFVQHLMSVAVVEAVRSIPEYQDI | |
| | NLRVKWPNDIYYSDLMKIGGVLVNSTLMGETFYILIGCGFNVTNSN | |
| | PTICINDLITEYNKQHKAELKPLRADYLIARVVTVLEKLIKEFQDKGP | |
| | NSVLPLYYRYWVHSGQQVHLGSAEGPKVSIVGLDDSGFLQVHQEG | |
| | GEVVTVHPDGNSFDMLRNLILPKRR | |
| 106 | MLKFRTVHGGLRLLGIRRTSTAPAASPNVRRLEYKPIKKVMVANRG | PC |
| | EIAIRVFRACTELGIRTVAIYSEQDTGQMHRQKADEAYLIGRGLAPV | |
| | QAYLHIPDIIKVAKENNVDAVHPGYGFLSERADFAQACQDAGVRFI | |
| | GPSPEVVRKMGDKVEARAIAIAAGVPVVPGTDAPITSLHEAHEFSNT | |
| | YGFPIIFKAAYGGGGRGMRVVHSYEELEENYTRAYSEALAAFGNGA | |
| | LFVEKFIEKPRHIEVQILGDQYGNILHLYERDCSIQRRHQKVVEIAPA | |
| | AHLDPQLRTRLTSDSVKLAKQVGYENAGTVEFLVDRHGKHYFIEV | |
| | NSRLQVEHTVTEEITDVDLVHAQIHVAEGRSLPDLGLRQENIRINGC | |
| | AIQCRVTTEDPARSFQPDTGRIEVFRSGEGMGIRLDNASAFQGAVISP | |
| | HYDSLLVKVIAHGKDHPTAATKMSRALAEFRVRGVKTNIAFLQNV | |
| | LNNQQFLAGTVDTQFIDENPELFQLRPAQNRAQKLLHYLGHVMVN | |
| | GPTTPIPVKASPSPTDPVVPAVPIGPPPAGFRDILLREGPEGFARAVRN | |
| | HPGLLLMDTTFRDAHQSLLATRVRTHDLKKIAPYVAHNFSKLFSME | |
| | NWGGATFDVAMRFLYECPWRRLQELRELIPNIPFQMLLRGANAVG | |
| | YTNYPDNVVFKFCEVAKENGMDVFRVFDSLNYLPNMLLGMEAAG | |
| | SAGGVVEAAISYTGDVADPSRTKYSLQYYMGLAEELVRAGTHILCI | |
| | KDMAGLLKPTACTMLVSSLRDRFPDLPLHIHTHDTSGAGVAAMLA | |
| | CAQAGADVVDVAADSMSGMTSQPSMGALVACTRGTPLDTEVPME | |
| | RVFDYSEYWEGARGLYAAFDCTATMKSGNSDVYENEIPGGQYTNL | |
| | HFQAHSMGLGSKFKEVKKAYVEANQMLGDLIKVTPSSKIVGDLAQ | |
| | FMVQNGLSRAEAEAQAEELSFPRSVVEFLQGYIGVPHGGFPEPFRSK | |
| | VLKDLPRVEGRPGASLPPLDLQALEKELVDRHGEEVTPEDVLSAAM | |
| | YPDVFAHFKDFTATFGPLDSLNTRLFLQGPKIAEEFEVELERGKTLHI | |
| | KALAVSDLNRAGQRQVFFELNGQLRSILVKDTQAMKEMHFHPKAL | |
| | KDVKGQIGAPMPGKVIDIKVVAGAKVAKGQPLCVLSAMKMETVVT | |
| | SPMEGTVRKVHVTKDMTLEGDDLILEIE | |
| 107 | MVDSTEYEVASQPEVETSPLGDGASPGPEQVKLKKEISLLNGVCLIV | SLC7A7 |
| | GNMIGSGIFVSPKGVLIYSASFGLSLVIWAVGGLFSVFGALCYAELG | |
| | TTIKKSGASYAYILEAFGGFLAFIRLWTSLLIIEPTSQAIIAITFANYMV | |
| | QPLFPSCFAPYAASRLLAAACICLLTFINCAYVKWGTLVQDIFTYAK | |
| | VLALIAVIVAGIVRLGQGASTHFENSFEGSSFAVGDIALALYSALFSY | |
| | SGWDTLNYVTEEIKNPERNLPLSIGISMPIVTIIYILTNVAYYTVLDM | |
| | RDILASDAVAVTFADQIFGIFNWIIPLSVALSCFGGLNASIVAASRLFF | |
| | VGSREGHLPDAICMIHVERFTPVPSLLFNGIMALIYLCVEDIFQLINY | |
| | YSFSYWFFVGLSIVGQLYLRWKEPDRPRPLKLSVFFPIVFCLCTIFLV | |
| | AVPLYSDTINSLIGIAIALSGLPFYFLIIRVPEHKRPLYLRRIVGSATRY | |
| | LQVLCMSVAAEMDLEDGGEMPKQRDPKSN | |
| 108 | MVPRLLLRAWPRGPAVGPGAPSRPLSAGSGPGQYLQRSIVPTMHYQ | CPT2 |
| | DSLPRLPIPKLEDTIRRYLSAQKPLLNDGQFRKTEQFCKSFENGIGKE | |
| | LHEQLVALDKQNKHTSYISGPWFDMYLSARDSVVLNFNPFMAFNP | |
| | DPKSEYNDQLTRATNMTVSAIRFLKTLRAGLLEPEVFHLNPAKSDTI | |
| | TFKRLIRFVPSSLSWYGAYLVNAYPLDMSQYFRLFNSTRLPKPSRDE | |
| | LFTDDKARHLLVLRKGNFYIFDVLDQDGNIVSPSEIQAHLKYILSDSS | |
| | PAPEFPLAYLTSENRDIWAELRQKLMSSGNEESLRKVDSAVFCLCLD | |
| | DFPIKDLVHLSHNMLHGDGTNRWFDKSFNLIIAKDGSTAVHFEHSW | |
| | GDGVAVLRFFNEVFKDSTQTPAVTPQSQPATTDSTVTVQKLNFELT | |
| | DALKTGITAAKEKFDATMKTLTIDCVQFQRGGKEFLKKQKLSPDAV | |
| | AQLAFQMAFLRQYGQTVATYESCSTAAFKHGRTETIRPASVYTKRC | |
| | SEAFVREPSRHSAGELQQMMVECSKYHGQLTKEAAMGQGFDRHLF | |
| | ALRHLAAAKGIILPELYLDPAYGQINHNVLSTSTLSSPAVNLGGFAP | |
| | VVSDGFGVGYAVHDNWIGCNVSSYPGRNAREFLQCVEKALEDMFD | |
| | ALEGKSIKS | |
| 109 | MAAGFGRCCRVLRSISRFHWRSQHTKANRQREPGLGFSFEFTEQQK | ACADM |
| | EFQATARKFAREEIIPVAAEYDKTGEYPVPLIRRAWELGLMNTHIPE | |
| | NCGGLGLGTFDACLISEELAYGCTGVQTAIEGNSLGQMPIIIAGNDQ | |
| | QKKKYLGRMTEEPLMCAYCVTEPGAGSDVAGIKTKAEKKGDEYII | |
| | NGQKMWITNGGKANWYFLLARSDPDPKAPANKAFTGFIVEADTPG | |
| | IQIGRKELNMGQRCSDTRGIVFEDVKVPKENVLIGDGAGFKVAMGA | |
| | FDKTRPVVAAGAVGLAQRALDEATKYALERKTFGKLLVEHQAISF | |
| | MLAEMAMKVELARMSYQRAAWEVDSGRRNTYYASIAKAFAGDIA | |
| | NQLATDAVQILGGNGFNTEYPVEKLMRDAKIYQIYEGTSQIQRLIVA | |
| | REHIDKYKN | |
| 110 | MAAALLARASGPARRALCPRAWRQLHTIYQSVELPETHQMLLQTC | ACADS |
| | RDFAEKELFPIAAQVDKEHLFPAAQVKKMGGLGLLAMDVPEELGG | |
| | AGLDYLAYAIAMEEISRGCASTGVIMSVNNSLYLGPILKFGSKEQKQ | |
| | AWVTPFTSGDKIGCFALSEPGNGSDAGAASTTARAEGDSWVLNGT | |
| | KAWITNAWEASAAVVFASTDRALQNKGISAFLVPMPTPGLTLGKKE | |
| | DKLGIRGSSTANLIFEDCRIPKDSILGEPGMGFKIAMQTLDMGRIGIA | |
| | SQALGIAQTALDCAVNYAENRMAFGAPLTKLQVIQFKLADMALAL | |
| | ESARLLTWRAAMLKDNKKPFIKEAAMAKLAASEAATAISHQAIQIL | |
| | GGMGYVTEMPAERHYRDARITEIYEGTSEIQRLVIAGHLLRSYRS | |
| 111 | MQAARMAASLGRQLLRLGGGSSRLTALLGQPRPGPARRPYAGGAA | ACADVL |
| | QLALDKSDSHPSDALTRKKPAKAESKSFAVGMFKGQLTTDQVFPYP | |
| | SVLNEEQTQFLKELVEPVSRFFEEVNDPAKNDALEMVEETTWQGLK | |
| | ELGAFGLQVPSELGGVGLCNTQYARLVEIVGMHDLGVGITLGAHQS | |
| | IGFKGILLFGTKAQKEKYLPKLASGETVAAFCLTEPSSGSDAASIRTS | |
| | AVPSPCGKYYTLNGSKLWISNGGLADIFTVFAKTPVTDPATGAVKE | |
| | KITAFVVERGFGGITHGPPEKKMGIKASNTAEVFFDGVRVPSENVLG | |
| | EVGSGFKVAMHILNNGRFGMAAALAGTMRGIIAKAVDHATNRTQF | |
| | GEKIHNFGLIQEKLARMVMLQYVTESMAYMVSANMDQGATDFQIE | |
| | AAISKIFGSEAAWKVTDECIQIMGGMGFMKEPGVERVLRDLRIFRIF | |
| | EGTNDILRLFVALQGCMDKGKELSGLGSALKNPFGNAGLLLGEAG | |
| | KQLRRRAGLGSGLSLSGLVHPELSRSGELAVRALEQFATVVEAKLIK | |
| | HKKGIVNEQFLLQRLADGAIDLYAMVVVLSRASRSLSEGHPTAQHE | |
| | KMLCDTWCIEAAARIREGMAALQSDPWQQELYRNFKSISKALVER | |
| | GGVVTSNPLGF | |
| 112 | MGHSKQIRILLLNEMEKLEKTLFRLEQGYELQFRLGPTLQGKAVTV | AGL |
| | YTNYPFPGETFNREKFRSLDWENPTEREDDSDKYCKLNLQQSGSFQ | |
| | YYFLQGNEKSGGGYIVVDPILRVGADNHVLPLDCVTLQTFLAKCLG | |
| | PFDEWESRLRVAKESGYNMIHFTPLQTLGLSRSCYSLANQLELNPDF | |
| | SRPNRKYTWNDVGQLVEKLKKEWNVICITDVVYNHTAANSKWIQE | |
| | HPECAYNLVNSPHLKPAWVLDRALWRFSCDVAEGKYKEKGIPALIE | |
| | NDHHMNSIRKIIWEDIFPKLKLWEFFQVDVNKAVEQFRRLLTQENR | |
| | RVTKSDPNQHLTIIQDPEYRRFGCTVDMNIALTTFIPHDKGPAAIEEC | |
| | CNWFHKRMEELNSEKHRLINYHQEQAVNCLLGNVFYERLAGHGPK | |
| | LGPVTRKHPLVTRYFTFPFEEIDFSMEESMIHLPNKACFLMAHNGW | |
| | VMGDDPLRNFAEPGSEVYLRRELICWGDSVKLRYGNKPEDCPYLW | |
| | AHMKKYTEITATYFQGVRLDNCHSTPLHVAEYMLDAARNLQPNLY | |
| | VVAELFTGSEDLDNVFVTRLGISSLIREAMSAYNSHEEGRLVYRYG | |
| | GEPVGSFVQPCLRPLMPAIAHALFMDITHDNECPIVHRSAYDALPST | |
| | TIVSMACCASGSTRGYDELVPHQISVVSEERFYTKWNPEALPSNTGE | |
| | VNFQSGIIAARCAISKLHQELGAKGFIQVYVDQVDEDIVAVTRHSPSI | |
| | HQSVVAVSRTAFRNPKTSFYSKEVPQMCIPGKIEEVVLEARTIERNT | |
| | KPYRKDENSINGTPDITVEIREHIQLNESKIVKQAGVATKGPNEYIQEI | |
| | EFENLSPGSVIIFRVSLDPHAQVAVGILRNHLTQFSPHFKSGSLAVDN | |
| | ADPILKIPFASLASRLTLAELNQILYRCESEEKEDGGGCYDIPNWSAL | |
| | KYAGLQGLMSVLAEIRPKNDLGHPFCNNLRSGDWMIDYVSNRLISR | |
| | SGTIAEVGKWLQAMFFYLKQIPRYLIPCYFDAILIGAYTTLLDTAWK | |
| | QMSSFVQNGSTFVKHLSLGSVQLCGVGKFPSLPILSPALMDVPYRLN | |
| | EITKEKEQCCVSLAAGLPHFSSGIFRCWGRDTFIALRGILLITGRYVE | |
| | ARNIILAFAGTLRHGLIPNLLGEGIYARYNCRDAVWWWLQCIQDYC | |
| | KMVPNGLDILKCPVSRMYPTDDSAPLPAGTLDQPLFEVIQEAMQKH | |
| | MQGIQFRERNAGPQIDRNMKDEGFNITAGVDEETGFVYGGNRFNC | |
| | GTWMDKMGESDRARNRGIPATPRDGSAVEIVGLSKSAVRWLLELS | |
| | KKNIFPYHEVTVKRHGKAIKVSYDEWNRKIQDNFEKLFHVSEDPSD | |
| | LNEKHPNLVHKRGIYKDSYGASSPWCDYQLRPNFTIAMVVAPELFT | |
| | TEKAWKALEIAEKKLLGPLGMKTLDPDDMVYCGIYDNALDNDNY | |
| | NLAKGFNYHQGPEWLWPIGYFLRAKLYFSRLMGPETTAKTIVLVKN | |
| | VLSRHYVHLERSPWKGLPELTNENAQYCPFSCETQAWSIATILETLY | |
| | DL | |
| 113 | MEEGMNVLHDFGIQSTHYLQVNYQDSQDWFILVSVIADLRNAFYV | G6PC |
| | LFPIWFHLQEAVGIKLLWVAVIGDWLNLVFKWILFGQRPYWWVLD | |
| | TDYYSNTSVPLIKQFPVTCETGPGSPSGHAMGTAGVYYVMVTSTLSI | |
| | FQGKIKPTYRFRCLNVILWLGFWAVQLNVCLSRIYLAAHFPHQVVA | |
| | GVLSGIAVAETFSHIHSIYNASLKKYFLITFFLFSFAIGFYLLLKGLGV | |
| | DLLWTLEKAQRWCEQPEWVHIDTTPFASLLKNLGTLFGLGLALNSS | |
| | MYRESCKGKLSKWLPFRLSSIVASLVLLHVFDSLKPPSQVELVFYVL | |
| | SFCKSAVVPLASVSVIPYCLAQVLGQPHKKSL | |
| 114 | MAAPMTPAARPEDYEAALNAALADVPELARLLEIDPYLKPYAVDF | GBE1 |
| | QRRYKQFSQILKNIGENEGGIDKFSRGYESFGVHRCADGGLYCKEW | |
| | APGAEGVFLTGDFNGWNPFSYPYKKLDYGKWELYIPPKQNKSVLV | |
| | PHGSKLKVVITSKSGEILYRISPWAKYVVREGDNVNYDWIHWDPEH | |
| | SYEFKHSRPKKPRSLRIYESHVGISSHEGKVASYKHFTCNVLPRIKGL | |
| | GYNCIQLMAIMEHAYYASFGYQITSFFAASSRYGTPEELQELVDTAH | |
| | SMGIIVLLDVVHSHASKNSADGLNMFDGTDSCYFHSGPRGTHDLW | |
| | DSRLFAYSSWEILRFLLSNIRWWLEEYRFDGFRFDGVTSMLYHHHG | |
| | VGQGFSGDYSEYFGLQVDEDALTYLMLANHLVHTLCPDSITIAEDV | |
| | SGMPALCSPISQGGGGFDYRLAMAIPDKWIQLLKEFKDEDWNMGDI | |
| | VYTLTNRRYLEKCIAYAESHDQALVGDKSLAFWLMDAEMYTNMS | |
| | VLTPFTPVIDRGIQLHKMIRLITHGLGGEGYLNFMGNEFGHPEWLDF | |
| | PRKGNNESYHYARRQFHLTDDDLLRYKFLNNFDRDMNRLEERYG | |
| | WLAAPQAYVSEKHEGNKIIAFERAGLLFIFNFHPSKSYTDYRVGTAL | |
| | PGKFKIVLDSDAAEYGGHQRLDHSTDFFSEAFEHNGRPYSLLVYIPS | |
| | RVALILQNVDLPN | |
| 115 | MRSRSNSGVRLDGYARLVQQTILCHQNPVTGLLPASYDQKDAWVR | PHKA1 |
| | DNVYSILAVWGLGLAYRKNADRDEDKAKAYELEQSVVKLMRGLL | |
| | HCMIRQVDKVESFKYSQSTKDSLHAKYNTKTCATVVGDDQWGHL | |
| | QLDATSVYLLFLAQMTASGLHIIHSLDEVNFIQNLVFYIEAAYKTAD | |
| | FGIWERGDKTNQGISELNASSVGMAKAALEALDELDLFGVKGGPQS | |
| | VIHVLADEVQHCQSILNSLLPRASTSKEVDASLLSVVSFPAFAVEDS | |
| | QLVELTKQEIITKLQGRYGCCRFLRDGYKTPKEDPNRLYYEPAELKL | |
| | FENIECEWPLFWTYFILDGVFSGNAEQVQEYKEALEAVLIKGKNGV | |
| | PLLPELYSVPPDRVDEEYQNPHTVDRVPMGKLPHMWGQSLYILGSL | |
| | MAEGFLAPGEIDPLNRRFSTVPKPDVVVQVSILAETEEIKTILKDKGI | |
| | YVETIAEVYPIRVQPARILSHIYSSLGCNNRMKLSGRPYRHMGVLGT | |
| | SKLYDIRKTIFTFTPQFIDQQQFYLALDNKMIVEMLRTDLSYLCSRW | |
| | RMTGQPTITFPISHSMLDEDGTSLNSSILAALRKMQDGYFGGARVQT | |
| | GKLSEFLTTSCCTHLSFMDPGPEGKLYSEDYDDNYDYLESGNWMN | |
| | DYDSTSHARCGDEVARYLDHLLAHTAPHPKLAPTSQKGGLDRFQA | |
| | AVQTTCDLMSLVTKAKELHVQNVHMYLPTKLFQASRPSFNLLDSP | |
| | HPRQENQVPSVRVEIHLPRDQSGEVDFKALVLQLKETSSLQEQADIL | |
| | YMLYTMKGPDWNTELYNERSATVRELLTELYGKVGEIRHWGLIRYI | |
| | SGILRKKVEALDEACTDLLSHQKHLTVGLPPEPREKTISAPLPYEALT | |
| | QLIDEASEGDMSISILTQEIMVYLAMYMRTQPGLFAEMFRLRIGLIIQ | |
| | VMATELAHSLRCSAEEATEGLMNLSPSAMKNLLHHILSGKEFGVER | |
| | SVRPTDSNVSPAISIHEIGAVGATKTERTGIMQLKSEIKQVEFRRLSIS | |
| | AESQSPGTSMTPSSGSFPSAYDQQSSKDSRQGQWQRRRRLDGALNR | |
| | VPVGFYQKVWKVLQKCHGLSVEGFVLPSSTTREMTPGEIKFSVHVE | |
| | SVLNRVPQPEYRQLLVEAILVLTMLADIEIHSIGSIIAVEKIVHIANDL | |
| | FLQEQKTLGADDTMLAKDPASGICTLLYDSAPSGRFGTMTYLSKAA | |
| | ATYVQEFLPHSICAMQ | |
| 116 | MRSRSNSGVRLDGYARLVQQTILCYQNPVTGLLSASHEQKDAWVR | PHKA2 |
| | DNIYSILAVWGLGMAYRKNADRDEDKAKAYELEQNVVKLMRGLL | |
| | QCMMRQVAKVEKFKHTQSTKDSLHAKYNTATCGTVVGDDQWGH | |
| | LQVDATSLFLLFLAQMTASGLRIIFTLDEVAFIQNLVFYIEAAYKVA | |
| | DYGMWERGDKTNQGIPELNASSVGMAKAALEAIDELDLFGAHGGR | |
| | KSVIHVLPDEVEHCQSILFSMLPRASTSKEIDAGLLSIISFPAFAVEDV | |
| | NLVNVTKNEIISKLQGRYGCCRFLRDGYKTPREDPNRLHYDPAELK | |
| | LFENIECEWPVFWTYFIIDGVFSGDAVQVQEYREALEGILIRGKNGIR | |
| | LVPELYAVPPNKVDEEYKNPHTVDRVPMGKVPHLWGQSLYILSSLL | |
| | AEGFLAAGEIDPLNRRFSTSVKPDVVVQVTVLAENNHIKDLLRKHG | |
| | VNVQSIADIHPIQVQPGRILSHIYAKLGRNKNMNLSGRPYRHIGVLG | |
| | TSKLYVIRNQIFTFTPQFTDQHHFYLALDNEMIVEMLRIELAYLCTC | |
| | WRMTGRPTLTFPISRTMLTNDGSDIHSAVLSTIRKLEDGYFGGARVK | |
| | LGNLSEFLTTSFYTYLTFLDPDCDEKLFDNASEGTFSPDSDSDLVGY | |
| | LEDTCNQESQDELDHYINHLLQSTSLRSYLPPLCKNTEDRHVFSAIH | |
| | STRDILSVMAKAKGLEVPFVPMTLPTKVLSAHRKSLNLVDSPQPLLE | |
| | KVPESDFQWPRDDHGDVDCEKLVEQLKDCSNLQDQADILYILYVIK | |
| | GPSWDTNLSGQHGVTVQNLLGELYGKAGLNQEWGLIRYISGLLRK | |
| | KVEVLAEACTDLLSHQKQLTVGLPPEPREKIISAPLPPEELTKLIYEA | |
| | SGQDISIAVLTQEIVVYLAMYVRAQPSLFVEMLRLRIGLIIQVMATEL | |
| | ARSLNCSGEEASESLMNLSPFDMKNLLHHILSGKEFGVERSVRPIHS | |
| | STSSPTISIHEVGHTGVTKTERSGINRLRSEMKQMTRRFSADEQFFSV | |
| | GQAASSSAHSSKSARSSTPSSPTGTSSSDSGGHHIGWGERQGQWLRR | |
| | RRLDGAINRVPVGFYQRVWKILQKCHGLSIDGYVLPSSTTREMTPH | |
| | EIKFAVHVESVLNRVPQPEYRQLLVEAIMVLTLLSDTEMTSIGGIIHV | |
| | DQIVQMASQLFLQDQVSIGAMDTLEKDQATGICHFFYDSAPSGAYG | |
| | TMTYLTRAVASYLQELLPNSGCQMQ | |
| 117 | MAGAAGLTAEVSWKVLERRARTKRSGSVYEPLKSINLPRPDNETL | PHKB |
| | WDKLDHYYRIVKSTLLLYQSPTTGLFPTKTCGGDQKAKIQDSLYCA | |
| | AGAWALALAYRRIDDDKGRTHELEHSAIKCMRGILYCYMRQADKV | |
| | QQFKQDPRPTTCLHSVFNVHTGDELLSYEEYGHLQINAVSLYLLYL | |
| | VEMISSGLQIIYNTDEVSFIQNLVFCVERVYRVPDFGVWERGSKYNN | |
| | GSTELHSSSVGLAKAALEAINGFNLFGNQGCSWSVIFVDLDAHNRN | |
| | RQTLCSLLPRESRSHNTDAALLPCISYPAFALDDEVLFSQTLDKVVR | |
| | KLKGKYGFKRFLRDGYRTSLEDPNRCYYKPAEIKLFDGIECEFPIFFL | |
| | YMMIDGVFRGNPKQVQEYQDLLTPVLHHTTEGYPVVPKYYYVPAD | |
| | FVEYEKNNPGSQKRFPSNCGRDGKLFLWGQALYIIAKLLADELISPK | |
| | DIDPVQRYVPLKDQRNVSMRFSNQGPLENDLVVHVALIAESQRLQV | |
| | FLNTYGIQTQTPQQVEPIQIWPQQELVKAYLQLGINEKLGLSGRPDR | |
| | PIGCLGTSKIYRILGKTVVCYPIIFDLSDFYMSQDVFLLIDDIKNALQF | |
| | IKQYWKMHGRPLFLVLIREDNIRGSRFNPILDMLAALKKGIIGGVKV | |
| | HVDRLQTLISGAVVEQLDFLRISDTEELPEFKSFEELEPPKHSKVKRQ | |
| | SSTPSAPELGQQPDVNISEWKDKPTHEILQKLNDCSCLASQAILLGIL | |
| | LKREGPNFITKEGTVSDHIERVYRRAGSQKLWLAVRYGAAFTQKFS | |
| | SSIAPHITTFLVHGKQVTLGAFGHEEEVISNPLSPRVIQNIIYYKCNTH | |
| | DEREAVIQQELVIHIGWIISNNPELFSGMLKIRIGWIIHAMEYELQIRG | |
| | GDKPALDLYQLSPSEVKQLLLDILQPQQNGRCWLNRRQIDGSLNRT | |
| | PTGFYDRVWQILERTPNGIIVAGKHLPQQPTLSDMTMYEMNFSLLV | |
| | EDTLGNIDQPQYRQIVVELLMVVSIVLERNPELEFQDKVDLDRLVKE | |
| | AFNEFQKDQSRLKEIEKQDDMTSFYNTPPLGKRGTCSYLTKAVMNL | |
| | LLEGEVKPNNDDPCLIS | |
| 118 | MTLDVGPEDELPDWAAAKEFYQKYDPKDVIGRGVSSVVRRCVHRA | PHKG2 |
| | TGHEFAVKIMEVTAERLSPEQLEEVREATRRETHILRQVAGHPHIITL | |
| | IDSYESSSFMFLVFDLMRKGELFDYLTEKVALSEKETRSIMRSLLEA | |
| | VSFLHANNIVHRDLKPENILLDDNMQIRLSDFGFSCHLEPGEKLREL | |
| | CGTPGYLAPEILKCSMDETHPGYGKEVDLWACGVILFTLLAGSPPF | |
| | WHRRQILMLRMIMEGQYQFSSPEWDDRSSTVKDLISRLLQVDPEAR | |
| | LTAEQALQHPFFERCEGSQPWNLTPRQRFRVAVWTVLAAGRVALS | |
| | THRVRPLTKNALLRDPYALRSVRHLIDNCAFRLYGHWVKKGEQQN | |
| | RAALFQHRPPGPFPIMGPEEEGDSAAITEDEAVLVLG | |
| 119 | MAAQGYGYYRTVIFSAMFGGYSLYYFNRKTFSFVMPSLVEEIPLDK | SLC37A4 |
| | DDLGFITSSQSAAYAISKFVSGVLSDQMSARWLFSSGLLLVGLVNIF | |
| | FAWSSTVPVFAALWFLNGLAQGLGWPPCGKVLRKWFEPSQFGTW | |
| | WAILSTSMNLAGGLGPILATILAQSYSWRSTLALSGALCVVVSFLCL | |
| | LLIHNEPADVGLRNLDPMPSEGKKGSLKEESTLQELLLSPYLWVLST | |
| | GYLVVFGVKTCCTDWGQFFLIQEKGQSALVGSSYMSALEVGGLVG | |
| | SIAAGYLSDRAMAKAGLSNYGNPRHGLLLFMMAGMTVSMYLFRV | |
| | TVTSDSPKLWILVLGAVFGFSSYGPIALFGVIANESAPPNLCGTSHAI | |
| | VGLMANVGGFLAGLPFSTIAKHYSWSTAFWVAEVICAASTAAFFLL | |
| | RNIRTKMGRVSKKAE | |
| 120 | MAAPGPALCLFDVDGTLTAPRQKITKEMDDFLQKLRQKIKIGVVGG | PMM2 |
| | SDFEKVQEQLGNDVVEKYDYVFPENGLVAYKDGKLLCRQNIQSHL | |
| | GEALIQDLINYCLSYIAKIKLPKKRGTFIEFRNGMLNVSPIGRSCSQEE | |
| | RIEFYELDKKENIRQKFVADLRKEFAGKGLTFSIGGQISFDVFPDGW | |
| | DKRYCLRHVENDGYKTIYFFGDKTMPGGNDHEIFTDPRTMGYSVT | |
| | APEDTRRICELLFS | |
| 121 | MPSETPQAEVGPTGCPHRSGPHSAKGSLEKGSPEDKEAKEPLWIRPD | CBS |
| | APSRCTWQLGRPASESPHHHTAPAKSPKILPDILKKIGDTPMVRINKI | |
| | GKKFGLKCELLAKCEFFNAGGSVKDRISLRMIEDAERDGTLKPGDTI | |
| | IEPTSGNTGIGLALAAAVRGYRCIIVMPEKMSSEKVDVLRALGAEIV | |
| | RTPTNARFDSPESHVGVAWRLKNEIPNSHILDQYRNASNPLAHYDT | |
| | TADEILQQCDGKLDMLVASVGTGGTITGIARKLKEKCPGCRIIGVDP | |
| | EGSILAEPEELNQTEQTTYEVEGIGYDFIPTVLDRTVVDKWFKSNDE | |
| | EAFTFARMLIAQEGLLCGGSAGSTVAVAVKAAQELQEGQRCVVILP | |
| | DSVRNYMTKFLSDRWMLQKGFLKEEDLTEKKPWWWHLRVQELGL | |
| | SAPLTVLPTITCGHTIEILREKGFDQAPVVDEAGVILGMVTLGNMLS | |
| | SLLAGKVQPSDQVGKVIYKQFKQIRLTDTLGRLSHILEMDHFALVV | |
| | HEQIQYHSTGKSSQRQMVFGVVTAIDLLNFVAAQERDQK | |
| 122 | MSFIPVAEDSDFPIHNLPYGVFSTRGDPRPRIGVAIGDQILDLSIIKHLF | FAH |
| | TGPVLSKHQDVFNQPTLNSFMGLGQAAWKEARVFLQNLLSVSQAR | |
| | LRDDTELRKCAFISQASATMHLPATIGDYTDFYSSRQHATNVGIMFR | |
| | DKENALMPNWLHLPVGYHGRASSVVVSGTPIRRPMGQMKPDDSKP | |
| | PVYGACKLLDMELEMAFFVGPGNRLGEPIPISKAHEHIFGMVLMND | |
| | WSARDIQKWEYVPLGPFLGKSFGTTVSPWVVPMDALMPFAVPNPK | |
| | QDPRPLPYLCHDEPYTFDINLSVNLKGEGMSQAATICKSNFKYMYW | |
| | TMLQQLTHHSVNGCNLRPGDLLASGTISGPEPENFGSMLELSWKGT | |
| | KPIDLGNGQTRKFLLDGDEVIITGYCQGDGYRIGFGQCAGKVLPALL | |
| | PS | |
| 123 | MDPYMIQMSSKGNLPSILDVHVNVGGRSSVPGKMKGRKARWSVRP | TAT |
| | SDMAKKTFNPIRAIVDNMKVKPNPNKTMISLSIGDPTVFGNLPTDPE | |
| | VTQAMKDALDSGKYNGYAPSIGFLSSREEIASYYHCPEAPLEAKDVI | |
| | LTSGCSQAIDLCLAVLANPGQNILVPRPGFSLYKTLAESMGIEVKLY | |
| | NLLPEKSWEIDLKQLEYLIDEKTACLIVNNPSNPCGSVFSKRHLQKIL | |
| | AVAARQCVPILADEIYGDMVFSDCKYEPLATLSTDVPILSCGGLAKR | |
| | WLVPGWRLGWILIHDRRDIFGNEIRDGLVKLSQRILGPCTIVQGALK | |
| | SILCRTPGEFYHNTLSFLKSNADLCYGALAAIPGLRPVRPSGAMYLM | |
| | VGIEMEHFPEFENDVEFTERLVAEQSVHCLPATCFEYPNFIRVVITVP | |
| | EVMMLEACSRIQEFCEQHYHCAEGSQEECDK | |
| 124 | MSRSGTDPQQRQQASEADAAAATFRANDHQHIRYNPLQDEWVLVS | GALT |
| | AHRMKRPWQGQVEPQLLKTVPRHDPLNPLCPGAIRANGEVNPQYD | |
| | STFLFDNDFPALQPDAPSPGPSDHPLFQAKSARGVCKVMCFHPWSD | |
| | VTLPLMSVPEIRAVVDAWASVTEELGAQYPWVQIFENKGAMMGCS | |
| | NPHPHCQVWASSFLPDIAQREERSQQAYKSQHGEPLLMEYSRQELL | |
| | RKERLVLTSEHWLVLVPFWATWPYQTLLLPRRHVRRLPELTPAERD | |
| | DLASIMKKLLTKYDNLFETSFPYSMGWHGAPTGSEAGANWNHWQ | |
| | LHAHYYPPLLRSATVRKFMVGYEMLAQAQRDLTPEQAAERLRALP | |
| | EVHYHLGQKDRETATIA | |
| 125 | MAALRQPQVAELLAEARRAFREEFGAEPELAVSAPGRVNLIGEHTD | GALK1 |
| | YNQGLVLPMALELMTVLVGSPRKDGLVSLLTTSEGADEPQRLQFPL | |
| | PTAQRSLEPGTPRWANYVKGVIQYYPAAPLPGFSAVVVSSVPLGGG | |
| | LSSSASLEVATYTFLQQLCPDSGTIAARAQVCQQAEHSFAGMPCGI | |
| | MDQFISLMGQKGHALLIDCRSLETSLVPLSDPKLAVLITNSNVRHSL | |
| | ASSEYPVRRRQCEEVARALGKESLREVQLEELEAARDLVSKEGFRR | |
| | ARHVVGEIRRTAQAAAALRRGDYRAFGRLMVESHRSLRDDYEVSC | |
| | PELDQLVEAALAVPGVYGSRMTGGGFGGCTVTLLEASAAPHAMRH | |
| | IQEHYGGTATFYLSQAADGAKVLCL | |
| 126 | MAEKVLVTGGAGYIGSHTVLELLEAGYLPVVIDNFHNAFRGGGSLP | GALE |
| | ESLRRVQELTGRSVEFEEMDILDQGALQRLFKKYSFMAVIHFAGLK | |
| | AVGESVQKPLDYYRVNLTGTIQLLEIMKAHGVKNLVFSSSATVYGN | |
| | PQYLPLDEAHPTGGCTNPYGKSKFFIEEMIRDLCQADKTWNAVLLR | |
| | YFNPTGAHASGCIGEDPQGIPNNLMPYVSQVAIGRREALNVFGNDY | |
| | DTEDGTGVRDYIHVVDLAKGHIAALRKLKEQCGCRIYNLGTGTGYS | |
| | VLQMVQAMEKASGKKIPYKVVARREGDVAACYANPSLAQEELGW | |
| | TAALGLDRMCEDLWRWQKQNPSGFGTQA | |
| 127 | MAEQVALSRTQVCGILREELFQGDAFHQSDTHIFIIMGASGDLAKKK | G6PD |
| | IYPTIWWLFRDGLLPENTFIVGYARSRLTVADIRKQSEPFFKATPEEK | |
| | LKLEDFFARNSYVAGQYDDAASYQRLNSHMNALHLGSQANRLFYL | |
| | ALPPTVYEAVTKNIHESCMSQIGWNRIIVEKPFGRDLQSSDRLSNHIS | |
| | SLFREDQIYRIDHYLGKEMVQNLMVLRFANRIFGPIWNRDNIACVIL | |
| | TFKEPFGTEGRGGYFDEFGIIRDVMQNHLLQMLCLVAMEKPASTNS | |
| | DDVRDEKVKVLKCISEVQANNVVLGQYVGNPDGEGEATKGYLDD | |
| | PTVPRGSTTATFAAVVLYVENERWDGVPFILRCGKALNERKAEVRL | |
| | QFHDVAGDIFHQQCKRNELVIRVQPNEAVYTKMMTKKPGMFFNPE | |
| | ESELDLTYGNRYKNVKLPDAYERLILDVFCGSQMHFVRSDELREA | |
| | WRIFTPLLHQIELEKPKPIPYIYGSRGPTEADELMKRVGFQYEGTYK | |
| | WVNPHKL | |
| 128 | MAEDKSKRDSIEMSMKGCQTNNGFVHNEDILEQTPDPGSSTDNLKH | SLC3A1 |
| | STRGILGSQEPDFKGVQPYAGMPKEVLFQFSGQARYRIPREILFWLT | |
| | VASVLVLIAATIAIIALSPKCLDWWQEGPMYQIYPRSFKDSNKDGNG | |
| | DLKGIQDKLDYITALNIKTVWITSFYKSSLKDFRYGVEDFREVDPIFG | |
| | TMEDFENLVAAIHDKGLKLIIDFIPNHTSDKHIWFQLSRTRTGKYTD | |
| | YYIWHDCTHENGKTIPPNNWLSVYGNSSWHFDEVRNQCYFHQFMK | |
| | EQPDLNFRNPDVQEEIKEILRFWLTKGVDGFSLDAVKFLLEAKHLR | |
| | DEIQVNKTQIPDTVTQYSELYHDFTTTQVGMHDIVRSFRQTMDQYS | |
| | TEPGRYRFMGTEAYAESIDRTVMYYGLPFIQEADFPFNNYLSMLDT | |
| | VSGNSVYEVITSWMENMPEGKWPNWMIGGPDSSRLTSRLGNQYVN | |
| | VMNMLLFTLPGTPITYYGEEIGMGNIVAANLNESYDINTLRSKSPMQ | |
| | WDNSSNAGFSEASNTWLPTNSDYHTVNVDVQKTQPRSALKLYQDL | |
| | SLLHANELLLNRGWFCHLRNDSHYVVYTRELDGIDRIFIVVLNFGES | |
| | TLLNLHNMISGLPAKMRIRLSTNSADKGSKVDTSGIFLDKGEGLIFE | |
| | HNTKNLLHRQTAFRDRCFVSNRACYSSVLNILYTSC | |
| 129 | MGDTGLRKRREDEKSIQSQEPKTTSLQKELGLISGISIIVGTIIGSGIFV | SLC7A9 |
| | SPKSVLSNTEAVGPCLIIWAACGVLATLGALCFAELGTMITKSGGEY | |
| | PYLMEAYGPIPAYLFSWASLIVIKPTSFAIICLSFSEYVCAPFYVGCKP | |
| | PQIVVKCLAAAAILFISTVNSLSVRLGSYVQNIFTAAKLVIVAIIIISGL | |
| | VLLAQGNTKNFDNSFEGAQLSVGAISLAFYNGLWAYDGWNQLNYI | |
| | TEELRNPYRNLPLAIIIGIPLVTACYILMNVSYFTVMTATELLQSQAV | |
| | AVTFGDRVLYPASWIVPLFVAFSTIGAANGTCFTAGRLIYVAGREGH | |
| | MLKVLSYISVRRLTPAPAIIFYGIIATIYIIPGDINSLVNYFSFAAWLFY | |
| | GLTILGLIVMRFTRKELERPIKVPVVIPVLMTLISVFLVLAPIISKPTW | |
| | EYLYCVLFILSGLLFYFLFVHYKFGWAQKISKPITMHLQMLMEVVPP | |
| | EEDPE | |
| 130 | MVNEARGNSSLNPCLEGSASSGSESSKDSSRCSTPGLDPERHERLRE | MTHFR |
| | KMRRRLESGDKWFSLEFFPPRTAEGAVNLISRFDRMAAGGPLYIDV | |
| | TWHPAGDPGSDKETSSMMIASTAVNYCGLETILHMTCCRQRLEEIT | |
| | GHLHKAKQLGLKNIMALRGDPIGDQWEEEEGGFNYAVDLVKHIRS | |
| | EFGDYFDICVAGYPKGHPEAGSFEADLKHLKEKVSAGADFIITQLFF | |
| | EADTFFRFVKACTDMGITCPIVPGIFPIQGYHSLRQLVKLSKLEVPQE | |
| | IKDVIEPIKDNDAAIRNYGIELAVSLCQELLASGLVPGLHFYTLNREM | |
| | ATTEVLKRLGMWTEDPRRPLPWALSAHPKRREEDVRPIFWASRPKS | |
| | YIYRTQEWDEFPNGRWGNSSSPAFGELKDYYLFYLKSKSPKEELLK | |
| | MWGEELTSEESVFEVFVLYLSGEPNRNGHKVTCLPWNDEPLAAETS | |
| | LLKEELLRVNRQGILTINSQPNINGKPSSDPIVGWGPSGGYVFQKAY | |
| | LEFFTSRETAEALLQVLKKYELRVNYHLVNVKGENITNAPELQPNA | |
| | VTWGIFPGREIIQPTVVDPVSFMFWKDEAFALWIERWGKLYEEESPS | |
| | RTIIQYIHDNYFLVNLVDNDFPLDNCLWQVVEDTLELLNRPTQNAR | |
| | ETEAP | |
| 131 | MSPALQDLSQPEGLKKTLRDEINAILQKRIMVLDGGMGTMIQREKL | MTR |
| | NEEHFRGQEFKDHARPLKGNNDILSITQPDVIYQIHKEYLLAGADIIE | |
| | TNTFSSTSIAQADYGLEHLAYRMNMCSAGVARKAAEEVTLQTGIKR | |
| | FVAGALGPTNKTLSVSPSVERPDYRNITFDELVEAYQEQAKGLLDG | |
| | GVDILLIETIFDTANAKAALFALQNLFEEKYAPRPIFISGTIVDKSGRT | |
| | LSGQTGEGFVISVSHGEPLCIGLNCALGAAEMRPFIEIIGKCTTAYVL | |
| | CYPNAGLPNTFGDYDETPSMMAKHLKDFAMDGLVNIVGGCCGSTP | |
| | DHIREIAEAVKNCKPRVPPATAFEGHMLLSGLEPFRIGPYTNFVNIGE | |
| | RCNVAGSRKFAKLIMAGNYEEALCVAKVQVEMGAQVLDVNMDD | |
| | GMLDGPSAMTRFCNLIASEPDIAKVPLCIDSSNFAVIEAGLKCCQGK | |
| | CIVNSISLKEGEDDFLEKARKIKKYGAAMVVMAFDEEGQATETDTK | |
| | IRVCTRAYHLLVKKLGFNPNDIIFDPNILTIGTGMEEHNLYAINFIHAT | |
| | KVIKETLPGARISGGLSNLSFSFRGMEAIREAMHGVFLYHAIKSGMD | |
| | MGIVNAGNLPVYDDIHKELLQLCEDLIWNKDPEATEKLLRYAQTQG | |
| | TGGKKVIQTDEWRNGPVEERLEYALVKGIEKHIIEDTEEARLNQKK | |
| | YPRPLNIIEGPLMNGMKIVGDLFGAGKMFLPQVIKSARVMKKAVGH | |
| | LIPFMEKEREETRVLNGTVEEEDPYQGTIVLATVKGDVHDIGKNIVG | |
| | VVLGCNNFRVIDLGVMTPCDKILKAALDHKADIIGLSGLITPSLDEMI | |
| | FVAKEMERLAIRIPLLIGGATTSKTHTAVKIAPRYSAPVIHVLDASKS | |
| | VVVCSQLLDENLKDEYFEEIMEEYEDIRQDHYESLKERRYLPLSQAR | |
| | KSGFQMDWLSEPHPVKPTFIGTQVFEDYDLQKLVDYIDWKPFFDV | |
| | WQLRGKYPNRGFPKIFNDKTVGGEARKVYDDAHNMLNTLISQKKL | |
| | RARGVVGFWPAQSIQDDIHLYAEAAVPQAAEPIATFYGLRQQAEKD | |
| | SASTEPYYCLSDFIAPLHSGIRDYLGLFAVACFGVEELSKAYEDDGD | |
| | DYSSIMVKALGDRLAEAFAEELHERVRRELWAYCGSEQLDVADLR | |
| | RLRYKGIRPAPGYPSQPDHTEKLTMWRLADIEQSTGIRLTESLAMAP | |
| | ASAVSGLYFSNLKSKYFAVGKISKDQVEDYALRKNISVAEVEKWLG | |
| | PILGYDTD | |
| 132 | MGAASVRAGARLVEVALCSFTVTCLEVMRRFLLLYATQQGQAKAI | MTRR |
| | AEEICEQAVVHGFSADLHCISESDKYDLKTETAPLVVVVSTTGTGDP | |
| | PDTARKFVKEIQNQTLPVDFFAHLRYGLLGLGDSEYTYFCNGGKIID | |
| | KRLQELGARHFYDTGHADDCVGLELVVEPWIAGLWPALRKHFRSS | |
| | RGQEEISGALPVASPASSRTDLVKSELLHIESQVELLRFDDSGRKDSE | |
| | VLKQNAVNSNQSNVVIEDFESSLTRSVPPLSQASLNIPGLPPEYLQVH | |
| | LQESLGQEESQVSVTSADPVFQVPISKAVQLTTNDAIKTTLLVELDIS | |
| | NTDFSYQPGDAFSVICPNSDSEVQSLLQRLQLEDKREHCVLLKIKAD | |
| | TKKKGATLPQHIPAGCSLQFIFTWCLEIRAIPKKAFLRALVDYTSDSA | |
| | EKRRLQELCSKQGAADYSRFVRDACACLLDLLLAFPSCQPPLSLLLE | |
| | HLPKLQPRPYSCASSSLFHPGKLHFVFNIVEFLSTATTEVLRKGVCTG | |
| | WLALLVASVLQPNIHASHEDSGKALAPKISISPRTTNSFHLPDDPSIPI | |
| | IMVGPGTGIAPFIGFLQHREKLQEQHPDGNFGAMWLFFGCRHKDRD | |
| | YLFRKELRHFLKHGILTHLKVSFSRDAPVGEEEAPAKYVQDNIQLH | |
| | GQQVARILLQENGHIYVCGDAKNMAKDVHDALVQIISKEVGVEKL | |
| | EAMKTLATLKEEKRYLQDIWS | |
| 133 | MPEQERQITAREGASRKILSKLSLPTRAWEPAMKKSFAFDNVGYEG | ATP7B |
| | GLDGLGPSSQVATSTVRILGMTCQSCVKSIEDRISNLKGIISMKVSLE | |
| | QGSATVKYVPSVVCLQQVCHQIGDMGFEASIAEGKAASWPSRSLPA | |
| | QEAVVKLRVEGMTCQSCVSSIEGKVRKLQGVVRVKVSLSNQEAVIT | |
| | YQPYLIQPEDLRDHVNDMGFEAAIKSKVAPLSLGPIDIERLQSTNPK | |
| | RPLSSANQNFNNSETLGHQGSHVVTLQLRIDGMHCKSCVLNIEENIG | |
| | QLLGVQSIQVSLENKTAQVKYDPSCTSPVALQRAIEALPPGNFKVSL | |
| | PDGAEGSGTDHRSSSSHSPGSPPRNQVQGTCSTTLIAIAGMTCASCV | |
| | HSIEGMISQLEGVQQISVSLAEGTATVLYNPSVISPEELRAAIEDMGF | |
| | EASVVSESCSTNPLGNHSAGNSMVQTTDGTPTSVQEVAPHTGRLPA | |
| | NHAPDILAKSPQSTRAVAPQKCFLQIKGMTCASCVSNIERNLQKEAG | |
| | VLSVLVALMAGKAEIKYDPEVIQPLEIAQFIQDLGFEAAVMEDYAG | |
| | SDGNIELTITGMTCASCVHNIESKLTRTNGITYASVALATSKALVKF | |
| | DPEIIGPRDIIKIIEEIGFHASLAQRNPNAHHLDHKMEIKQWKKSFLCS | |
| | LVFGIPVMALMIYMLIPSNEPHQSMVLDHNIIPGLSILNLIFFILCTFV | |
| | QLLGGWYFYVQAYKSLRHRSANMDVLIVLATSIAYVYSLVILVVA | |
| | VAEKAERSPVTFFDTPPMLFVFIALGRWLEHLAKSKTSEALAKLMS | |
| | LQATEATVVTLGEDNLIIREEQVPMELVQRGDIVKVVPGGKFPVDG | |
| | KVLEGNTMADESLITGEAMPVTKKPGSTVIAGSINAHGSVLIKATHV | |
| | GNDTTLAQIVKLVEEAQMSKAPIQQLADRFSGYFVPFIIIMSTLTLVV | |
| | WIVIGFIDFGVVQRYFPNPNKHISQTEVIIRFAFQTSITVLCIACPCSLG | |
| | LATPTAVMVGTGVAAQNGILIKGGKPLEMAHKIKTVMFDKTGTITH | |
| | GVPRVMRVLLLGDVATLPLRKVLAVVGTAEASSEHPLGVAVTKYC | |
| | KEELGTETLGYCTDFQAVPGCGIGCKVSNVEGILAHSERPLSAPASH | |
| | LNEAGSLPAEKDAVPQTFSVLIGNREWLRRNGLTISSDVSDAMTDH | |
| | EMKGQTAILVAIDGVLCGMIAIADAVKQEAALAVHTLQSMGVDVV | |
| | LITGDNRKTARAIATQVGINKVFAEVLPSHKVAKVQELQNKGKKVA | |
| | MVGDGVNDSPALAQADMGVAIGTGTDVAIEAADVVLIRNDLLDVV | |
| | ASIHLSKRTVRRIRINLVLALIYNLVGIPIAAGVFMPIGIVLQPWMGS | |
| | AAMAASSVSVVLSSLQLKCYKKPDLERYEAQAHGHMKPLTASQVS | |
| | VHIGMDDRWRDSPRATPWDQVSYVSQVSLSSLTSDKPSRHSAAAD | |
| | DDGDKWSLLLNGRDEEQYI | |
| 134 | MATRSPGVVISDDEPGYDLDLFCIPNHYAEDLERVFIPHGLIMDRTE | HPRT1 |
| | RLARDVMKEMGGHHIVALCVLKGGYKFFADLLDYIKALNRNSDRS | |
| | IPMTVDFIRLKSYCNDQSTGDIKVIGGDDLSTLTGKNVLIVEDIIDTG | |
| | KTMQTLLSLVRQYNPKMVKVASLLVKRTPRSVGYKPDFVGFEIPDK | |
| | FVVGYALDYNEYFRDLNHVCVISETGKAKYKA | |
| 135 | MGEPGQSPSPRSSHGSPPTLSTLTLLLLLCGHAHSQCKILRCNAEYVS | HJV |
| | STLSLRGGGSSGALRGGGGGGRGGGVGSGGLCRALRSYALCTRRT | |
| | ARTCRGDLAFHSAVHGIEDLMIQHNCSRQGPTAPPPPRGPALPGAGS | |
| | GLPAPDPCDYEGRFSRLHGRPPGFLHCASFGDPHVRSFHHHFHTCR | |
| | VQGAWPLLDNDFLFVQATSSPMALGANATATRKLTIIFKNMQECID | |
| | QKVYQAEVDNLPVAFEDGSINGGDRPGGSSLSIQTANPGNHVEIQA | |
| | AYIGTTIIIRQTAGQLSFSIKVAEDVAMAFSAEQDLQLCVGGCPPSQR | |
| | LSRSERNRRGAITIDTARRLCKEGLPVEDAYFHSCVFDVLISGDPNFT | |
| | VAAQAALEDARAFLPDLEKLHLFPSDAGVPLSSATLLAPLLSGLFVL | |
| | WLCIQ | |
| 136 | MALSSQIWAACLLLLLLLASLTSGSVFPQQTGQLAELQPQDRAGAR | HAMP |
| | ASWMPMFQRRRRRDTHFPICIFCCGCCHRSKCGMCCKT | |
| 137 | MRSPRTRGRSGRPLSLLLALLCALRAKVCGASGQFELEILSMQNVN | JAG1 |
| | GELQNGNCCGGARNPGDRKCTRDECDTYFKVCLKEYQSRVTAGGP | |
| | CSFGSGSTPVIGGNTFNLKASRGNDRNRIVLPFSFAWPRSYTLLVEA | |
| | WDSSNDTVQPDSIIEKASHSGMINPSRQWQTLKQNTGVAHFEYQIR | |
| | VTCDDYYYGFGCNKFCRPRDDFFGHYACDQNGNKTCMEGWMGPE | |
| | CNRAICRQGCSPKHGSCKLPGDCRCQYGWQGLYCDKCIPHPGCVH | |
| | GICNEPWQCLCETNWGGQLCDKDLNYCGTHQPCLNGGTCSNTGPD | |
| | KYQCSCPEGYSGPNCEIAEHACLSDPCHNRGSCKETSLGFECECSPG | |
| | WTGPTCSTNIDDCSPNNCSHGGTCQDLVNGFKCVCPPQWTGKTCQ | |
| | LDANECEAKPCVNAKSCKNLIASYYCDCLPGWMGQNCDININDCL | |
| | GQCQNDASCRDLVNGYRCICPPGYAGDHCERDIDECASNPCLNGG | |
| | HCQNEINRFQCLCPTGFSGNLCQLDIDYCEPNPCQNGAQCYNRASD | |
| | YFCKCPEDYEGKNCSHLKDHCRTTPCEVIDSCTVAMASNDTPEGVR | |
| | YISSNVCGPHGKCKSQSGGKFTCDCNKGFTGTYCHENINDCESNPC | |
| | RNGGTCIDGVNSYKCICSDGWEGAYCETNINDCSQNPCHNGGTCRD | |
| | LVNDFYCDCKNGWKGKTCHSRDSQCDEATCNNGGTCYDEGDAFK | |
| | CMCPGGWEGTTCNIARNSSCLPNPCHNGGTCVVNGESFTCVCKEG | |
| | WEGPICAQNTNDCSPHPCYNSGTCVDGDNWYRCECAPGFAGPDCR | |
| | ININECQSSPCAFGATCVDEINGYRCVCPPGHSGAKCQEVSGRPCIT | |
| | MGSVIPDGAKWDDDCNTCQCLNGRIACSKVWCGPRPCLLHKGHSE | |
| | CPSGQSCIPILDDQCFVHPCTGVGECRSSSLQPVKTKCTSDSYYQDN | |
| | CANITFTFNKEMMSPGLTTEHICSELRNLNILKNVSAEYSIYIACEPSP | |
| | SANNEIHVAISAEDIRDDGNPIKEITDKIIDLVSKRDGNSSLIAAVAEV | |
| | RVQRRPLKNRTDFLVPLLSSVLTVAWICCLVTAFYWCLRKRRKPGS | |
| | HTHSASEDNTTNNVREQLNQIKNPIEKHGANTVPIKDYENKNSKMS | |
| | KIRTHNSEVEEDDMDKHQQKARFAKQPAYTLVDREEKPPNGTPTK | |
| | HPNWTNKQDNRDLESAQSLNRMEYIV | |
| 138 | MASHRLLLLCLAGLVFVSEAGPTGTGESKCPLMVKVLDAVRGSPAI | TTR |
| | NVAVHVFRKAADDTWEPFASGKTSESGELHGLTTEEEFVEGIYKVE | |
| | IDTKSYWKALGISPFHEHAEVVFTANDSGPRRYTIAALLSPYSYSTT | |
| | AVVTNPKE | |
| 139 | MASHKLLVTPPKALLKPLSIPNQLLLGPGPSNLPPRIMAAGGLQMIG | AGXT |
| | SMSKDMYQIMDEIKEGIQYVFQTRNPLTLVISGSGHCALEAALVNV | |
| | LEPGDSFLVGANGIWGQRAVDIGERIGARVHPMTKDPGGHYTLQEV | |
| | EEGLAQHKPVLLFLTHGESSTGVLQPLDGFGELCHRYKCLLLVDSV | |
| | ASLGGTPLYMDRQGIDILYSGSQKALNAPPGTSLISFSDKAKKKMYS | |
| | RKTKPFSFYLDIKWLANFWGCDDQPRMYHHTIPVISLYSLRESLALI | |
| | AEQGLENSWRQHREAAAYLHGRLQALGLQLFVKDPALRLPTVTTV | |
| | AVPAGYDWRDIVSYVIDHFDIEIMGGLGPSTGKVLRIGLLGCNATRE | |
| | NVDRVTEALRAALQHCPKKKL | |
| 140 | MKMRFLGLVVCLVLWTLHSEGSGGKLTAVDPETNMNVSEIISYWG | LIPA |
| | FPSEEYLVETEDGYILCLNRIPHGRKNHSDKGPKPVVFLQHGLLADS | |
| | SNWVTNLANSSLGFILADAGFDVWMGNSRGNTWSRKHKTLSVSQD | |
| | EFWAFSYDEMAKYDLPASINFILNKTGQEQVYYVGHSQGTTIGFIAF | |
| | SQIPELAKRIKMFFALGPVASVAFCTSPMAKLGRLPDHLIKDLFGDK | |
| | EFLPQSAFLKWLGTHVCTHVILKELCGNLCFLLCGFNERNLNMSRV | |
| | DVYTTHSPAGTSVQNMLHWSQAVKFQKFQAFDWGSSAKNYFHYN | |
| | QSYPPTYNVKDMLVPTAVWSGGHDWLADVYDVNILLTQITNLVFH | |
| | ESIPEWEHLDFIWGLDAPWRLYNKIINLMRKYQ | |
| 141 | MASRLTLLTLLLLLLAGDRASSNPNATSSSSQDPESLQDRGEGKVAT | SERPING1 |
| | TVISKMLFVEPILEVSSLPTTNSTTNSATKITANTTDEPTTQPTTEPTT | |
| | QPTIQPTQPTTQLPTDSPTQPTTGSFCPGPVTLCSDLESHSTEAVLGD | |
| | ALVDFSLKLYHAFSAMKKVETNMAFSPFSIASLLTQVLLGAGENTK | |
| | TNLESILSYPKDFTCVHQALKGFTTKGVTSVSQIFHSPDLAIRDTFVN | |
| | ASRTLYSSSPRVLSNNSDANLELINTWVAKNTNNKISRLLDSLPSDT | |
| | RLVLLNAIYLSAKWKTTFDPKKTRMEPFHFKNSVIKVPMMNSKKYP | |
| | VAHFIDQTLKAKVGQLQLSHNLSLVILVPQNLKHRLEDMEQALSPS | |
| | VFKAIMEKLEMSKFQPTLLTLPRIKVTTSQDMLSIMEKLEFFDFSYD | |
| | LNLCGLTEDPDLQVSAMQHQTVLELTETGVEAAAASAISVARTLLV | |
| | FEVQQPFLFVLWDQQHKFPVFMGRVYDPRA | |
| 142 | MGSPLRFDGRVVLVTGAGAGLGRAYALAFAERGALVVVNDLGGD | HSD17B4 |
| | FKGVGKGSLAADKVVEEIRRRGGKAVANYDSVEEGEKVVKTALDA | |
| | FGRIDVVVNNAGILRDRSFARISDEDWDIIHRVHLRGSFQVTRAAWE | |
| | HMKKQKYGRIIMTSSASGIYGNFGQANYSAAKLGLLGLANSLAIEG | |
| | RKSNIHCNTIAPNAGSRMTQTVMPEDLVEALKPEYVAPLVLWLCHE | |
| | SCEENGGLFEVGAGWIGKLRWERTLGAIVRQKNHPMTPEAVKANW | |
| | KKICDFENASKPQSIQESTGSIIEVLSKIDSEGGVSANHTSRATSTATS | |
| | GFAGAIGQKLPPFSYAYTELEAIMYALGVGASIKDPKDLKFIYEGSS | |
| | DFSCLPTFGVIIGQKSMMGGGLAEIPGLSINFAKVLHGEQYLELYKP | |
| | LPRAGKLKCEAVVADVLDKGSGVVIIMDVYSYSEKELICHNQFSLF | |
| | LVGSGGFGGKRTSDKVKVAVAIPNRPPDAVLTDTTSLNQAALYRLS | |
| | GDWNPLHIDPNFASLAGFDKPILHGLCTFGFSARRVLQQFADNDVS | |
| | RFKAIKARFAKPVYPGQTLQTEMWKEGNRIHFQTKVQETGDIVISN | |
| | AYVDLAPTSGTSAKTPSEGGKLQSTFVFEEIGRRLKDIGPEVVKKVN | |
| | AVFEWHITKGGNIGAKWTIDLKSGSGKVYQGPAKGAADTTIILSDE | |
| | DFMEVVLGKLDPQKAFFSGRLKARGNIMLSQKLQMILKDYAKL | |
| 143 | MEANGLGPQGFPELKNDTFLRAAWGEETDYTPVWCMRQAGRYLP | UROD |
| | EFRETRAAQDFFSTCRSPEACCELTLQPLRRFPLDAAIIFSDILVVPQA | |
| | LGMEVTMVPGKGPSFPEPLREEQDLERLRDPEVVASELGYVFQAITL | |
| | TRQRLAGRVPLIGFAGAPWTLMTYMVEGGGSSTMAQAKRWLYQR | |
| | PQASHQLLRILTDALVPYLVGQVVAGAQALQLFESHAGHLGPQLFN | |
| | KFALPYIRDVAKQVKARLREAGLAPVPMIIFAKDGHFALEELAQAG | |
| | YEVVGLDWTVAPKKARECVGKTVTLQGNLDPCALYASEEEIGQLV | |
| | KQMLDDFGPHRYIANLGHGLYPDMDPEHVGAFVDAVHKHSRLLR | |
| | QN | |
| 144 | MGPRARPALLLLMLLQTAVLQGRLLRSHSLHYLFMGASEQDLGLSL | HFE |
| | FEALGYVDDQLFVFYDHESRRVEPRTPWVSSRISSQMWLQLSQSLK | |
| | GWDHMFTVDFWTIMENHNHSKESHTLQVILGCEMQEDNSTEGYW | |
| | KYGYDGQDHLEFCPDTLDWRAAEPRAWPTKLEWERHKIRARQNR | |
| | AYLERDCPAQLQQLLELGRGVLDQQVPPLVKVTHHVTSSVTTLRCR | |
| | ALNYYPQNITMKWLKDKQPMDAKEFEPKDVLPNGDGTYQGWITL | |
| | AVPPGEEQRYTCQVEHPGLDQPLIVIWEPSPSGTLVIGVISGIAVFVVI | |
| | LFIGILFIILRKRQGSRGAMGHYVLAERE | |
| 145 | MESKALLVLTLAVWLQSLTASRGGVAAADQRRDFIDIESKFALRTP | LPL |
| | EDTAEDTCHLIPGVAESVATCHFNHSSKTFMVIHGWTVTGMYESW | |
| | VPKLVAALYKREPDSNVIVVDWLSRAQEHYPVSAGYTKLVGQDVA | |
| | RFINWMEEEFNYPLDNVHLLGYSLGAHAAGIAGSLTNKKVNRITGL | |
| | DPAGPNFEYAEAPSRLSPDDADFVDVLHTFTRGSPGRSIGIQKPVGH | |
| | VDIYPNGGTFQPGCNIGEAIRVIAERGLGDVDQLVKCSHERSIHLFID | |
| | SLLNEENPSKAYRCSSKEAFEKGLCLSCRKNRCNNLGYEINKVRAK | |
| | RSSKMYLKTRSQMPYKVFHYQVKIHFSGTESETHTNQAFEISLYGT | |
| | VAESENIPFTLPEVSTNKTYSFLIYTEVDIGELLMLKLKWKSDSYFS | |
| | WSDWWSSPGFAIQKIRVKAGETQKKVIFCSREKVSHLQKGKAPAVF | |
| | VKCHDKSLNKKSG | |
| 146 | MRPVRLMKVFVTRRIPAEGRVALARAADCEVEQWDSDEPIPAKELE | GRHPR |
| | RGVAGAHGLLCLLSDHVDKRILDAAGANLKVISTMSVGIDHLALDE | |
| | IKKRGIRVGYTPDVLTDTTAELAVSLLLTTCRRLPEAIEEVKNGGWT | |
| | SWKPLWLCGYGLTQSTVGIIGLGRIGQAIARRLKPFGVQRFLYTGRQ | |
| | PRPEEAAEFQAEFVSTPELAAQSDFIVVACSLTPATEGLCNKDFFQK | |
| | MKETAVFINISRGDVVNQDDLYQALASGKIAAAGLDVTSPEPLPTN | |
| | HPLLTLKNCVILPHIGSATHRTRNTMSLLAANNLLAGLRGEPMPSEL | |
| | KL | |
| 147 | MLGPQVWSSVRQGLSRSLSRNVGVWASGEGKKVDIAGIYPPVTTPF | HOGA1 |
| | TATAEVDYGKLEENLHKLGTFPFRGFVVQGSNGEFPFLTSSERLEVV | |
| | SRVRQAMPKNRLLLAGSGCESTQATVEMTVSMAQVGADAAMVVT | |
| | PCYYRGRMSSAALIHHYTKVADLSPIPVVLYSVPANTGLDLPVDAV | |
| | VTLSQHPNIVGMKDSGGDVTRIGLIVHKTRKQDFQVLAGSAGFLMA | |
| | SYALGAVGGVCALANVLGAQVCQLERLCCTGQWEDAQKLQHRLIE | |
| | PNAAVTRRFGIPGLKKIMDWFGYYGGPCRAPLQELSPAEEEALRMD | |
| | FTSNGWL | |
| 148 | MGPWGWKLRWTVALLLAAAGTAVGDRCERNEFQCQDGKCISYK | LDLR |
| | WVCDGSAECQDGSDESQETCLSVTCKSGDFSCGGRVNRCIPQFWRC | |
| | DGQVDCDNGSDEQGCPPKTCSQDEFRCHDGKCISRQFVCDSDRDCL | |
| | DGSDEASCPVLTCGPASFQCNSSTCIPQLWACDNDPDCEDGSDEWP | |
| | QRCRGLYVFQGDSSPCSAFEFHCLSGECIHSSWRCDGGPDCKDKSD | |
| | EENCAVATCRPDEFQCSDGNCIHGSRQCDREYDCKDMSDEVGCVN | |
| | VTLCEGPNKFKCHSGECITLDKVCNMARDCRDWSDEPIKECGTNEC | |
| | LDNNGGCSHVCNDLKIGYECLCPDGFQLVAQRRCEDIDECQDPDTC | |
| | SQLCVNLEGGYKCQCEEGFQLDPHTKACKAVGSIAYLFFTNRHEVR | |
| | KMTLDRSEYTSLIPNLRNVVALDTEVASNRIYWSDLSQRMICSTQLD | |
| | RAHGVSSYDTVISRDIQAPDGLAVDWIHSNIYWTDSVLGTVSVADT | |
| | KGVKRKTLFRENGSKPRAIVVDPVHGFMYWTDWGTPAKIKKGGLN | |
| | GVDIYSLVTENIQWPNGITLDLLSGRLYWVDSKLHSISSIDVNGGNR | |
| | KTILEDEKRLAHPFSLAVFEDKVFWTDIINEAIFSANRLTGSDVNLLA | |
| | ENLLSPEDMVLFHNLTQPRGVNWCERTTLSNGGCQYLCLPAPQINP | |
| | HSPKFTCACPDGMLLARDMRSCLTEAEAAVATQETSTVRLKVSSTA | |
| | VRTQHTTTRPVPDTSRLPGATPGLTTVEIVTMSHQALGDVAGRGNE | |
| | KKPSSVRALSIVLPIVLLVFLCLGVFLLWKNWRLKNINSINFDNPVY | |
| | QKTTEDEVHICHNQDGYSYPSRQMVSLEDDVA | |
| 149 | MLWSGCRRFGARLGCLPGGLRVLVQTGHRS | ACAD8 |
| | LTSCIDPSMGLNEEQKEFQKVAFDFAAREM | |
| | APNMAEWDQKELFPVDVMRKAAQLGFGGVY | |
| | IQTDVGGSGLSRLDTSVIFEALATGCTSTT | |
| | AYISIHNMCAWMIDSFGNEE | |
| | QRHKFCPPLCTMEKFASYCLTEPGSGSDAA | |
| | SLLTSAKKQGDHYILNGSKAFISGAGESDI | |
| | YVVMCRTGGPGPKGISCIVVEKGTPGLSFG | |
| | KKEKKVGWNSQPTRAVIFEDCAVPVANRIG | |
| | SEGQGFLIAVRGLNGGRINIASCSLGAAHA | |
| | SVILTRDHLNVRKQFGEPLASNQYLQFTLADMATRLVAARLMVRN | |
| | AAVALQEERKDAVALCSMAKLFATDECFAICNQALQMHGGYGYL | |
| | KDYAVQQYVRDSRVHQILEGSNEVMRILISRSLLQE | |
| 150 | MEGLAVRLLRGSRLLRRNFLTCLSSWKIPPHVSKSSQSEALLNITNN | ACADSB |
| | GIHFAPLQTFTDEEMMIKSSVKKFAQEQIAPLVSTMDENSKMEKSVI | |
| | QGLFQQGLMGIEVDPEYGGTGASFLSTVLVIEELAKVDASVAVFCEI | |
| | QNTLINTLIRKHGTEEQKATYLPQLTTEKVGSFCLSEAGAGSDSFAL | |
| | KTRADKEGDYYVLNGSKMWISSAEHAGLFLVMANVDPTIGYKGIT | |
| | SFLVDRDTPGLHIGKPENKLGLRASSTCPLTFENVKVPEANILGQIGH | |
| | GYKYAIGSLNEGRIGIAAQMLGLAQGCFDYTIPYIKERIQFGKRLFDF | |
| | QGLQHQVAHVATQLEAARLLTYNAARLLEAGKPFIKEASMAKYYA | |
| | SEIAGQTTSKCIEWMGGVGYTKDYPVEKYFRDAKIGTIYEGASNIQL | |
| | NTIAKHIDAEY | |
| 151 | MAVLAALLRSGARSRSPLLRRLVQEIRYVERSYVSKPTLKEVVIVSA | ACAT1 |
| | TRTPIGSFLGSLSLLPATKLGSIAIQGAIEKAGIPKEEVKEAYMGNVL | |
| | QGGEGQAPTRQAVLGAGLPISTPCTTINKVCASGMKAIMMASQSLM | |
| | CGHQDVMVAGGMESMSNVPYVMNRGSTPYGGVKLEDLIVKDGLT | |
| | DVYNKIHMGSCAENTAKKLNIARNEQDAYAINSYTRSKAAWEAGK | |
| | FGNEVIPVTVTVKGQPDVVVKEDEEYKRVDFSKVPKLKTVFQKEN | |
| | GTVTAANASTLNDGAAALVLMTADAAKRLNVTPLARIVAFADAAV | |
| | EPIDFPIAPVYAASMVLKDVGLKKEDIAMWEVNEAFSLVVLANIKM | |
| | LEIDPQKVNINGGAVSLGHPIGMSGARIVGHLTHALKQGEYGLASIC | |
| | NGGGGASAMLIQKL | |
| 152 | MLPHVVLTFRRLGCALASCRLAPARHRGSGLLHTAPVARSDRSAPV | ACSF3 |
| | FTRALAFGDRIALDQHGRHTYRELYSRSLRLSQEICRLCGCVGGDLR | |
| | EERVSFLCANDASYVVAQWASWMSGGVAVPLYRKHPAAQLEYVI | |
| | CDSQSSVVLASQEYLELLSPVVRKLGVPLLPLTPAIYTGAVEEPAEV | |
| | PVPEQGWRNKGAMIIYTSGTTGRPKGVLSTHQNIRAVVTGLVHKW | |
| | AWTKDDVILHVLPLHHVHGVVNALLCPLWVGATCVMMPEFSPQQ | |
| | VWEKFLSSETPRINVFMAVPTIYTKLMEYYDRHFTQPHAQDFLRAV | |
| | CEEKIRLMVSGSAALPLPVLEKWKNITGHTLLERYGMTEIGMALSG | |
| | PLTTAVRLPGSVGTPLPGVQVRIVSENPQREACSYTIHAEGDERGTK | |
| | VTPGFEEKEGELLVRGPSVFREYWNKPEETKSAFTLDGWFKTGDTV | |
| | VFKDGQYWIRGRTSVDIIKTGGYKVSALEVEWHLLAHPSITDVAVIG | |
| | VPDMTWGQRVTAVVTLREGHSLSHRELKEWARNVLAPYAVPSELV | |
| | LVEEIPRNQMGKIDKKALIRHFHPS | |
| 153 | MTSCHIAEEHIQKVAIFGGTHGNELTGVFLVKHWLENGAEIQRTGLE | ASPA |
| | VKPFITNPRAVKKCTRYIDCDLNRIFDLENLGKKMSEDLPYEVRRAQ | |
| | EINHLFGPKDSEDSYDIIFDLHNTTSNMGCTLILEDSRNNFLIQMFHYI | |
| | KTSLAPLPCYVYLIEHPSLKYATTRSIAKYPVGIEVGPQPQGVLRADI | |
| | LDQMRKMIKHALDFIHHFNEGKEFPPCAIEVYKIIEKVDYPRDENGE | |
| | IA | |
| | AIIHPNLQDQDWKPLHPGDPMFLTLDGKTIPLGGDCTVYPVFVNEA | |
| | AYYEKKEAFAKTTKLTLNAKSIRCCLH | |
| 154 | MAAAVAAAPGALGSLHAGGARLVAACSAWLCPGLRLPGSLAGRR | AUH |
| | AGPAIWAQGWVPAAGGPAPKRGYSSEMKTEDELRVRHLEEENRGI | |
| | VVLGINRAYGKNSLSKNLIKMLSKAVDALKSDKKVRTIIIRSEVPGIF | |
| | CAGADLKERAKMSSSEVGPFVSKIRAVINDIANLPVPTIAAIDGLAL | |
| | GGGLELALACDIRVAASSAKMGLVETKLAIIPGGGGTQRLPRAIGMS | |
| | LAKELIFSARVLDGKEAKAVGLISHVLEQNQEGDAAYRKALDLARE | |
| | FLPQGPVAMRVAKLAINQGMEVDLVTGLAIEEACYAQTIPTKDRLE | |
| | GLLAFKEKRPPRYKGE | |
| 155 | MASTVVAVGLTIAAAGFAGRYVLQAMKHMEPQVKQVFQSLPKSAF | DNAJC19 |
| | SGGYYRGGFEPKMTKREAALILGVSPTANKGKIRDAHRRIMLLNHP | |
| | DKGGSPYIAAKINEAKDLLEGQAKK | |
| 156 | MAEAVLRVARRQLSQRGGSGAPILLRQMFEPVSCTFTYLLGDRESR | ETHE1 |
| | EAVLIDPVLETAPRDAQLIKELGLRLLYAVNTHCHADHITGSGLLRS | |
| | LLPGCQSVISRLSGAQADLHIEDGDSIRFGRFALETRASPGHTPGCVT | |
| | FVLNDHSMAFTGDALLIRGCGRTDFQQGCAKTLYHSVHEKIFTLPG | |
| | DCLIYPAHDYHGFTVSTVEEERTLNPRLTLSCEEFVKIMGNLNLPKP | |
| | QQIDFAVPANMRCGVQTPTA | |
| 157 | MADQAPFDTDVNTLTRFVMEEGRKARGTGELTQLLNSLCTAVKAIS | FBP1 |
| | SAVRKAGIAHLYGIAGSTNVTGDQVKKLDVLSNDLVMNMLKSSFA | |
| | TCVLVSEEDKHAIIVEPEKRGKYVVCFDPLDGSSNIDCLVSVGTIFGI | |
| | YRKKSTDEPSEKDALQPGRNLVAAGYALYGSATMLVLAMDCGVN | |
| | CFMLDPAIGEFILVDKDVKIKKKGKIYSLNEGYARDFDPAVTEYIQR | |
| | KKFPPDNSAPYGARYVGSMVADVHRTLVYGGIFLYPANKKSPNGK | |
| | LRLLYECNPMAYVMEKAGGMATTGKEAVLDVIPTDIHQRAPVILGS | |
| | PDDVLEFLKVYEKHSAQ | |
| 158 | MSQLVECVPNFSEGKNQEVIDAISGAITQTPGCVLLDVDAGPSTNRT | FTCD |
| | VYTFVGPPECVVEGALNAARVASRLIDMSRHQGEHPRMGALDVCP | |
| | FIPVRGVSVDECVLCAQAFGQRLAEELDVPVYLYGEAARMDSRRTL | |
| | PAIRAGEYEALPKKLQQADWAPDFGPSSFVPSWGATATGARKFLIA | |
| | FNINLLGTKEQAHRIALNLREQGRGKDQPGRLKKVQGIGWYLDEKN | |
| | LAQVSTNLLDFEVTALHTVYEETCREAQELSLPVVGSQLVGLVPLK | |
| | ALLDAAAFYCEKENLFILEEEQRI | |
| | RLVVSRLGLDSLCPFSPKERIIEYLVPERGPERGLGSKSLRAFVGEVG | |
| | ARSAAPGGGSVAAAAAAMGAALGSMVGLMTYGRRQFQSLDTTMR | |
| | RLIPPFREASAKLTTLVDADAEAFTAYLEAMRLPKNTPEEKDRRTA | |
| | ALQEGLRRAVSVPLTLAETVASLWPALQELARCGNLACRSDLQVA | |
| | AKALEMGVFGAYFNVLINLRDITDEAFKDQIHHRVSSLLQEAKTQA | |
| | ALVLDCLETRQE | |
| 159 | MATNWGSLLQDKQQLEELARQAVDRALAEGVLLRTSQEPTSSEVV | GSS |
| | SYAPFTLFPSLVPSALLEQAYAVQMDFNLLVDAVSQNAAFLEQTLS | |
| | STIKQDDFTARLFDIHKQVLKEGIAQTVFLGLNRSDYMFQRSADGSP | |
| | ALKQIEINTISASFGGLASRTPAVHRHVLSVLSKTKEAGKILSNNPSK | |
| | GLALGIAKAWELYGSPNALVLLIAQEKERNIFDQRAIENELLARNIH | |
| | VIRRTFEDISEKGSLDQDRRLFVDGQEIAVVYFRDGYMPRQYSLQN | |
| | WEARLLLERSHAAKCPDIATQLAGTKKVQQELSRPGMLEMLLPGQ | |
| | PEAVARLRATFAGLYSLDVGEEGDQAIAEALAAPSRFVLKPQREGG | |
| | GNNLYGEEMVQALKQLKDSEERASYILMEKIEPEPFENCLLRPGSPA | |
| | RVVQCISELGIFGVYVRQEKTLVMNKHVGHLLRTKAIEHADGGVA | |
| | AGVAVLDNPYPV | |
| 160 | MGQREMWRLMSRFNAFKRTNTILHHLRMSKHTDAAEEVLLEKKG | HIBCH |
| | CTGVITLNRPKFLNALTLNMIRQIYPQLKKWEQDPETFLIIIKGAGGK | |
| | AFCAGGDIRVISEAEKAKQKIAPVFFREEYMLNNAVGSCQKPYVALI | |
| | HGITMGGGVGLSVHGQFRVATEKCLFAMPETAIGLFPDVGGGYFLP | |
| | RLQGKLGYFLALTGFRLKGRDVYRAGIATHFVDSEKLAMLEEDLLA | |
| | LKSPSKENIASVLENYHTESKIDRDKSFILEEHMDKINSCFSANTVEEI | |
| | IENLQQDGSSFALEQLKVINKMSPTSLKITLRQLMEGSSKTLQEVLT | |
| | MEYRLSQACMRGHDFHEGVRAVLIDKDQSPKWKPADLKEVTEEDL | |
| | NNHFKSLGSSDLKF | |
| 161 | MAGYLRVVRSLCRASGSRPAWAPAALTAPTSQEQPRRHYADKRIK | IDH2 |
| | VAKPVVEMDGDEMTRIIWQFIKEKLILPHVDIQLKYFDLGLPNRDQT | |
| | DDQVTIDSALATQKYSVAVKCATITPDEARVEEFKLKKMWKSPNG | |
| | TIRNILGGTVFREPIICKNIPRLVPGWTKPITIGRHAHGDQYKATDFV | |
| | ADRAGTFKMVFTPKDGSGVKEWEVYNFPAGGVGMGMYNTDESIS | |
| | GFAHSCFQYAIQKKWPLYMSTKNTILKAYDGRFKDIFQEIFDKHYK | |
| | TDFDKNKIWYEHRLIDDMVAQVLKSSGGFVWACKNYDGDVQSDIL | |
| | AQGFGSLGLMTSVLVCPDGKTIEAEAAHGTVTRHYREHQKGRPTST | |
| | NPIASIFAWTRGLEHRGKLDGNQDLIRFAQMLEKVCVETVESGAMT | |
| | KDLAGCIHGLSNVKLNEHFLNTTDFLDTIKSNLDRALGRQ | |
| 162 | MVPALRYLVGACGRARGLFAGGSPGACGFASGRPRPLCGGSRSAST | L2HGDH |
| | SSFDIVIVGGGIVGLASARALILRHPSLSIGVLEKEKDLAVHQTGHNS | |
| | GVIHSGIYYKPESLKAKLCVQGAALLYEYCQQKGISYKQCGKLIVA | |
| | VEQEEIPRLQALYEKGLQNGVPGLRLIQQEDIKKKEPYCRGLMAIDC | |
| | PHTGIVDYRQVALSFAQDFQEAGGSVLTNFEVKGIEMAKESPSRSID | |
| | GMQYPIVIKNTKGEEIRCQYVVTCAGLYSDRISELSGCTPDPRIVPFR | |
| | GDYLLLKPEKCYLVKGNIYPVPDSRFPFLGVHFTPRMDGSIWLGPN | |
| | AVLAFKREGYRPFDFSATDVMDIIINSGLIKLASQNFSYGVTEMYKA | |
| | CFLGATVKYLQKFIPEITISDILRGPAGVRAQALDRDGNLVEDFVFD | |
| | AGVGDIGNRILHVRNAPSPAATSSIAISGMIADEVQQRFEL | |
| 163 | MRGFGPGLTARRLLPLRLPPRPPGPRLASGQAAGALERAMDELLRR | MLYCD |
| | AVPPTPAYELREKTPAPAEGQCADFVSFYGGLAETAQRAELLGRLA | |
| | RGFGVDHGQVAEQSAGVLHLRQQQREAAVLLQAEDRLRYALVPR | |
| | YRGLFHHISKLDGGVRFLVQLRADLLEAQALKLVEGPDVREMNGV | |
| | LKGMLSEWFSSGFLNLERVTWHSPCEVLQKISEAEAVHPVKNWMD | |
| | MKRRVGPYRRCYFFSHCSTPGEPLVVLHVALTGDISSNIQAIVKEHP | |
| | PSETEEKNKITAAIFYSISLTQQGLQG | |
| | VELGTFLIKRVVKELQREFPHLGVFSSLSPIPGFTKWLLGLLNSQTKE | |
| | HGRNELFTDSECKEISEITGGPINETLKLLLSSSEWVQSEKLVRALQT | |
| | PLMRLCAWYLYGEKHRGYALNPVANFHLQNGAVLWRINWMADV | |
| | SLRGITGSCGLMANYRYFLEETGPNSTSYLGSKIIKASEQVLSLVAQF | |
| | QKNSKL | |
| 164 | MVVGAFPMAKLLYLGIRQVSKPLANRIKEAARRSEFFKTYICLPPAQ | OPA3 |
| | LYHWVEMRTKMRIMGFRGTVIKPLNEEAAAELGAELLGEATIFIVG | |
| | GGCLVLEYWRHQAQQRHKEEEQRAAWNALRDEVGHLALALEALQ | |
| | AQVQAAPPQGALEELRTELQEVRAQLCNPGRSASHAVPASKK | |
| 165 | MGSPEGRFHFAIDRGGTFTDVFAQCPGGHVRVLKLLSEDPANYADA | OPLAH |
| | PTEGIRRILEQEAGMLLPRDQPLDSSHIASIRMGTTVATNALLERKGE | |
| | RVALLVTRGFRDLLHIGTQARGDLFDLAVPMPEVLYEEVLEVDERV | |
| | VLHRGEAGTGTPVKGRTGDLLEVQQPVDLGALRGKLEGLLSRGIRS | |
| | LAVVLMHSYTWAQHEQQVGVLARELGFTHVSLSSEAMPMVRIVPR | |
| | GHTACADAYLTPAIQRYVQGFCRGFQGQLKDVQVLFMRSDGGLAP | |
| | MDTFSGSSAVLSGPAGGVVGYSATTYQQEGGQPVIGFDMGGTSTD | |
| | VSRYAGEFEHVFEASTAGVTLQAPQLDINTVAAGGGSRLFFRSGLF | |
| | VVGPESAGAHPGPACYRKGGPVTVTDANLVLGRLLPASFPCIFGPG | |
| | ENQPLSPEASRKALEAVATEVNSFLTNGPCPASPLSLEEVAMGFVRV | |
| | ANEAMCRPIRALTQARGHDPSAHVLACFGGAGGQHACAIARALGM | |
| | DTVHIHRHSGLLSALGLALADVVHEAQEPCSLLYAPETFVQLDQRL | |
| | SRLEEQCVDALQAQGFPRSQISTESFLHLRYQGTDCALMVSAHQHP | |
| | ATA | |
| | RSPRAGDFGAAFVERYMREFGFVIPERPVVVDDVRVRGTGRSGLRL | |
| | EDAPKAQTGPPRVDKMTQCYFEGGYQETPVYLLAELGYGHKLHGP | |
| | CLIIDSNSTILVEPGCQAEVTKTGDICISVGAEVPGTVGPQLDPIQLSIF | |
| | SHRFMSIAEQMGRILQRTAISTNIKERLDFSCALFGPDGGLVSNAPHI | |
| | PVHLGAMQETVQFQIQHLGADLHPGDVLLSNHPSAGGSHLPDLTVI | |
| | TPVFWPGQTRPVFYVASRGHHADIGGITPGSMPPHSTMLQQEGAVF | |
| | LSFKLVQGGVFQEEAVTEALRAPGKVPNCSGTRNLHDNLSDLRAQ | |
| | VAANQKGIQLVGELIGQYGLDVVQAYMGHIQANAELAVRDMLRAF | |
| | GTSRQARGLPLEVSSEDHMDDGSPIRLRVQISLSQGSAVFDFSGTGP | |
| | EVFGNLNAPRAVTLSALIYCLRCLVGRDIPLNQGCLAPVRVVIPRGSI | |
| | LDPSPEAAVVGGNVLTSQRVVDVILGAFGACAASQGCMNNVTLGN | |
| | AHMGYYETVAGGAGAGPSWHGRSGVHSHMTNTRITDPEILESRYP | |
| | VILRRFELRRGSGGRGRFRGGDGVTRELLFREEALLSVLTERRAFRP | |
| | YGLHGGEPGARGLNLLIRKNGRTVNLGGKTSVTVYPGDVFCLHTPG | |
| | GGGYGDPEDPAPPPGSPPQALAFPEHGSVYEYRRAQEAV | |
| 166 | MAALKLLSSGLRLCASARGSGATWYKGCVCSFSTSAHRHTKFYTD | OXCT1 |
| | PVEAVKDIPDGATVLVGGFGLCGIPENLIDALLKTGVKGLTAVSNN | |
| | AGVDNFGLGLLLRSKQIKRMVSSYVGENAEFERQYLSGELEVELTP | |
| | QGTLAERIRAGGAGVPAFYTPTGYGTLVQEGGSPIKYNKDGSVAIA | |
| | SKPREVREFNGQHFILEEAITGDFALVKAWKADRAGNVIFRKSARN | |
| | FNLPMCKAAETTVVEVEEIVDIGAFAPEDIHIPQIYVHRLIKGEKYEK | |
| | RIERLSIRKEGDGEAKSAKPGDDVRERIIKRAALEFEDGMYANLGIGI | |
| | PLLASNFISPNITVHLQSENGVLGLGPYPRQHEADADLINAGKETVTI | |
| | LPGASFFSSDESFAMIRGGHVDLTMLGAMQVSKYGDLANWMIPGK | |
| | MVKGMGGAMDLVSSAKTKVVVTMEHSAKGNAHKIMEKCTLPLTG | |
| | KQCVNRIITEKAVFDVDKKKGLTLIELWEGLTVDDVQKSTGCDFAV | |
| | SPKLMPMQQIAN | |
| 167 | MSRLLWRKVAGATVGPGPVPAPGRWVSSSVPASDPSDGQRRRQQQ | POLG |
| | QQQQQQQQQQPQQPQVLSSEGGQLRHNPLDIQMLSRGLHEQIFGQG | |
| | GEMPGEAAVRRSVEHLQKHGLWGQPAVPLPDVELRLPPLYGDNLD | |
| | QHFRLLAQKQSLPYLEAANLLLQAQLPPKPPAWAWAEGWTRYGPE | |
| | GEAVPVAIPEERALVFDVEVCLAEGTCPTLAVAISPSAWYSWCSQR | |
| | LVEERYSWTSQLSPADLIPLEVPTGASSPTQRDWQEQLVVGHNVSF | |
| | DRAHIREQYLIQGSRMRFLDTMSMHMAISGLSSFQRSLWIAAKQGK | |
| | HKVQPPTKQGQKSQRKARRGPAISSWDWLDISSVNSLAEVHRLYV | |
| | GGPPLEKEPRELFVKGTMKDIRENFQDLMQYCAQDVWATHEVFQQ | |
| | QLPLFLERCPHPVTLAGMLEMGVSYLPVNQNWERYLAEAQGTYEE | |
| | LQREMKKSLMDLANDACQLLSGERYKEDPWLWDLEWDLQEFKQK | |
| | KAKKVKKEPATASKLPIEGAGAPGDPMDQEDLGPCSEEEEFQQDV | |
| | MARACLQKLKGTTELLPKRPQHLPGHPGWYRKLCPRLDDPAWTPG | |
| | PSLLSLQMRVTPKLMALTWDGFPLHYSERHGWGYLVPGRRDNLAK | |
| | LPTGTTLESAGVVCPYRAIESLYRKHCLEQGKQQLMPQEAGLAEEF | |
| | LLTDNSAIWQTVEELDYLEVEAEAKMENLRAAVPGQPLALTARGG | |
| | PKDTQPSYHHGNGPYNDVDIPGCWFFKLPHKDGNSCNVGSPFAKDF | |
| | LPKMEDGTLQAGPGGASGPRALEINKMISFWRNAHKRISSQMVVW | |
| | LPRSALPRAVIRHPDYDEEGLYGAILPQVVTAGTITRRAVEPTWLTA | |
| | SNARPDRVGSELKAMVQAPPGYTLVGADVDSQELWIAAVLGDAHF | |
| | AGMHGCTAFGWMTLQGRKSRGTDLHSKTATTVGISREHAKIFNYG | |
| | RIYGAGQPFAERLLMQFNHRLTQQEAAEKAQQMYAATKGLRWYR | |
| | LSDEGEWLVRELNLPVDRTEGGWISLQDLRKVQRETARKSQWKKW | |
| | EVVAERAWKGGTESEMFNKLESIATSDIPRTPVLGCCISRALEPSAV | |
| | QEEFMTSRVNWVVQSSAVDYLHLMLVAMKWLFEEFAIDGRFCISIH | |
| | DEVRYLVREEDRYRAALALQITNLLTRCMFAYKLGLNDLPQSVAFF | |
| | SAVDIDRCLRKEVTMDCKTPSNPTGMERRYGIPQGEALDIYQIIELT | |
| | KGSLEKRSQPGP | |
| 168 | MSTAALITLVRSGGNQVRRRVLLSSRLLQDDRRVTPTCHSSTSEPRC | PPM1K |
| | SRFDPDGSGSPATWDNFGIWDNRIDEPILLPPSIKYGKPIPKISLENVG | |
| | CASQIGKRKENEDRFDFAQLTDEVLYFAVYDGHGGPAAADFCHTH | |
| | MEKCIMDLLPKEKNLETLLTLAFLEIDKAFSSHARLSADATLLTSGT | |
| | TATVALLRDGIELVVASVGDSRAILCRKGKPMKLTIDHTPERKDEKE | |
| | RIKKCGGFVAWNSLGQPHVNGRLAMTRSIGDLDLKTSGVIAEPETK | |
| | RIKLHHADDSFLVLTTDGINFMVNSQEICDFVNQCHDPNEAAHAVT | |
| | EQAIQYGTEDNSTAVVVPFGAWGKYKNSEINFSFSRSFASSGRWA | |
| 169 | MSLAAYCVICCRRIGTSTSPPKSGTHWRDIRNIIKFTGSLILGGSLFLT | SERAC1 |
| | YEVLALKKAVTLDTQVVEREKMKSYIYVHTVSLDKGENHGIAWQA | |
| | RKELHKAVRKVLATSAKILRNPFADPFSTVDIEDHECAVWLLLRKS | |
| | KSDDKTTRLEAVREMSETHHWHDYQYRIIAQACDPKTLIGLARSEE | |
| | SDLRFFLLPPPLPSLKEDSSTEEELRQLLASLPQTELDECIQYFTSLAL | |
| | SESSQ | |
| | SLAAQKGGLWCFGGNGLPYAESFGEVPSATVEMFCLEAIVKHSEIST | |
| | HCDKIEANGGLQLLQRLYRLHKDCPKVQRNIMRVIGNMALNEHLH | |
| | SSIVRSGWVSIMAEAMKSPHIMESSHAARILANLDRETVQEKYQDG | |
| | VYVLHPQYRTSQPIKADVLFIHGLMGAAFKTWRQQDSEQAVIEKPM | |
| | EDEDRYTTCWPKTWLAKDCPALRIISVEYDTSLSDWRARCPMERKS | |
| | IAFRSNELLRKLRAAGVGDRPVVWISHSMGGLLVKKMLLEASTKPE | |
| | MSTVINNTRGIIFYSVPHHGSRLAEYSVNIRYLLFPSLEVKELSKDSP | |
| | ALKTLQDDFLEFAKDKNFQVLNFVETLPTYIGSMIKLHVVPVESADL | |
| | GIGDLIPVDVNHLNICKPKKKDAFLYQRTLQFIREALAKDLEN | |
| 170 | MPAPRAPRALAAAAPASGKAKLTHPGKAILAGGLAGGIEICITFPTE | SLC25A1 |
| | YVKTQLQLDERSHPPRYRGIGDCVRQTVRSHGVLGLYRGLSSLLYG | |
| | SIPKAAVRFGMFEFLSNHMRDAQGRLDSTRGLLCGLGAGVAEAVV | |
| | VVCPMETIKVKFIHDQTSPNPKYRGFFHGVREIVREQGLKGTYQGLT | |
| | ATVLKQGSNQAIRFFVMTSLRNWYRGDNPNKPMNPLITGVFGAIAG | |
| | AASVFGNTPLDVIKTRMQGLEAHKYRNTWDCGLQILKKEGLKAFY | |
| | KGTVPRLGRVCLDVAIVFVIYDEV | |
| | VKLLNKVWKTD | |
| 171 | MAASMFYGRLVAVATLRNHRPRTAQRAAAQVLGSSGLFNNHGLQ | SUCLA2 |
| | VQQQQQRNLSLHEYMSMELLQEAGVSVPKGYVAKSPDEAYAIAKK | |
| | LGSKDVVIKAQVLAGGRGKGTFESGLKGGVKIVFSPEEAKAVSSQM | |
| | IGKKLFTKQTGEKGRICNQVLVCERKYPRREYYFAITMERSFQGPVL | |
| | IGSSHGGVNIEDVAAESPEAIIKEPIDIEEGIKKEQALQLAQKMGFPPN | |
| | IVESAAENMVKLYSLFLKYDATMIEINPMVEDSDGAVLCMDAKINF | |
| | DSNSAYRQKKIFDLQDWTQEDERDKDAAKANLNYIGLDGNIGCLV | |
| | NGAGLAMATMDIIKLHGGTPANFLDVGGGATVHQVTEAFKLITSDK | |
| | KVLAILVNIFGGIMRCDVIAQGIVMAVKDLEIKIPVVVRLQGTRVDD | |
| | AKALIADSGLKILACDDLDEAARMVVKLSEIVTLAKQAHVDVKFQL | |
| | PI | |
| 172 | MTATLAAAADIATMVSGSSGLAAARLLSRSFLLPQNGIRHCSYTAS | SUCLG1 |
| | RQHLYVDKNTKIICQGFTGKQGTFHSQQALEYGTKLVGGTTPGKGG | |
| | QTHLGLPVFNTVKEAKEQTGATASVIYVPPPFAAAAINEAIEAEIPLV | |
| | VCITEGIPQQDMVRVKHKLLRQEKTRLIGPNCPGVINPGECKIGIMP | |
| | GHIHKKGRIGIVSRSGTLTYEAVHQTTQVGLGQSLCVGIGGDPFNGT | |
| | DFIDCLEIFLNDSATEGIILIGEIGGNAEENAAEFLKQHNSGPNSKPVV | |
| | SFIAGLTAPPGRRMGHAGAIIAGGKGGAKEKISALQSAGVVVSMSP | |
| | AQLGTTIYKEFEKRKML | |
| 173 | MPLHVKWPFPAVPPLTWTLASSVVMGLVGTYSCFWTKYMNHLTV | TAZ |
| | HNREVLYELIEKRGPATPLITVSNHQSCMDDPHLWGILKLRHIWNLK | |
| | LMRWTPAAADICFTKELHSHFFSLGKCVPVCRGAEFFQAENEGKGV | |
| | LDTGRHMPGAGKRREKGDGVYQKGMDFILEKLNHGDWVHIFPEG | |
| | KVNMSSEFLRFKWGIGRLIAECHLNPIILPLWHVGMNDVLPNSPPYF | |
| | PRFGQKITVLIGKPFSALPVLERLRAENKSAVEMRKALTDFIQEEFQ | |
| | HLKTQAEQLHNHLQPGR | |
| 174 | MTVFFKTLRNHWKKTTAGLCLLTWGGHWLYGKHCDNLLRRAACQ | AGK |
| | EAQVFGNQLIPPNAQVKKATVFLNPAACKGKARTLFEKNAAPILHL | |
| | SGMDVTIVKTDYEGQAKKLLELMENTDVIIVAGGDGTLQEVVTGV | |
| | LRRTDEATFSKIPIGFIPLGETSSLSHTLFAESGNKVQHITDATLAIVK | |
| | GETVPLDVLQIKGEKEQPVFAMTGLRWGSFRDAGVKVSKYWYLGP | |
| | LKIKAAHFFSTLKEWPQTHQASISYTGPTERPPNEPEETPVQRPSLYR | |
| | RILRRLASYWAQPQDALSQEVSPEVWKDVQLSTIELSITTRNNQLDP | |
| | TSKEDFLNICIEPDTISKGDFITIGSRKVRNPKLHVEGTECLQASQCTL | |
| | LIPEGAGGSFSIDSEEYEAMPVEVKLLPRKLQFFCDPRKREQMLTSPT | |
| | Q | |
| 175 | MLGSLVLRRKALAPRLLLRLLRSPTLRGHGGASGRNVTTGSLGEPQ | CLPB |
| | WLRVATGGRPGTSPALFSGRGAATGGRQGGRFDTKCLAAATWGRL | |
| | PGPEETLPGQDSWNGVPSRAGLGMCALAAALVVHCYSKSPSNKDA | |
| | ALLEAARANNMQEVSRLLSEGADVNAKHRLGWTALMVAAINRNN | |
| | SVVQVLLAAGADPNLGDDFSSVYKTAKEQGIHSLEDGGQDGASRHI | |
| | TNQWTSALEFRRWLGLPAGVLITREDDFNNRLNNRASFKGCTALH | |
| | YAVLADDYRTVKELLDGGANPLQRNEMGHTPLDYAREGEVMKLL | |
| | RTSEAKYQEKQRKREAEERRRFPLEQRLKEHIIGQESAIATVGAA | |
| | IRRKENGWYDEEHPLVFLFLGSSGIGKTELAKQTAKYMHKDAKKG | |
| | FIRLDMSEFQERHEVAKFIGSPPGYVGHEEGGQLTKKLKQCPNAVV | |
| | LFDEVDKAHPDVLTIMLQLFDEGRLTDGKGKTIDCKDAIFIMTSNVA | |
| | SDEIAQHALQLRQEALEMSRNRIAENLGDVQISDKITISKNFKENVIR | |
| | PILKAHFRRDEFLGRINEIVYFLPFCHSELIQLVNKELNFWAKRAKQR | |
| | HNITLLWDREVADVLVDGYNVHYGARSIKHEVERRVVNQLAAAYE | |
| | QDLLPGGCTLRITVEDSDKQLLKSPELPSPQAEKRLPKLRLEIIDKDS | |
| | KTRRLDIRAPLHPEKVCNTI | |
| 176 | MLFLALGSPWAVELPLCGRRTALCAAAALRGPRASVSRASSSSGPS | TMEM70 |
| | GPVAGWSTGPSGAARLLRRPGRAQIPVYWEGYVRFLNTPSDKSEDG | |
| | RLIYTGNMARAVFGVKCFSYSTSLIGLTFLPYIFTQNNAISESVPLPIQ | |
| | IIFYGIMGSFTVITPVLLHFITKGYVIRLYHEATTDTYKAITYNAMLA | |
| | ETSTVFHQNDVKIPDAKHVFTTFYAKTKSLLVNPVLFPNREDYIHLM | |
| | GYDKEEFILYMEETSEEKRHKDDK | |
| 177 | MLSQVYRCGFQPFNQHLLPWVKCTTVFRSHCIQPSVIRHVRSWSNIP | ALDH18A1 |
| | FITVPLSRTHGKSFAHRSELKHAKRIVVKLGSAVVTRGDECGLALGR | |
| | LASIVEQVSVLQNQGREMMLVTSGAVAFGKQRLRHEILLSQSVRQA | |
| | LHSGQNQLKEMAIPVLEARACAAAGQSGLMALYEAMFTQYSICAA | |
| | QILVTNLDFHDEQKRRNLNGTLHELLRMNIVPIVNTNDAVVPPAEP | |
| | NSDLQGVNVISVKDNDSLAARLAVEMKTDLLIVLSDVEGLFDSPPG | |
| | SDDAKLIDIFYPGDQQSVTFGTKSRVGMGGMEAKVKAALWALQGG | |
| | TSVVIANGTHPKVSGHVITDIVEGKKVGTFFSEVKPAGPTVEQQGE | |
| | MARSGGRMLATLEPEQRAEIIHHLADLLTDQRDEILLANKKDLEEA | |
| | EGRLAAPLLKRLSLSTSKLNSLAIGLRQIAASSQDSVGRVLRRTRIAK | |
| | NLELEQVTVPIGVLLVIFESRPDCLPQVAALAIASGNGLLLKGGKEA | |
| | AHSNRILHLLTQEALSIHGVKEAVQLVNTREEVEDLCRLDKMIDLIIP | |
| | RGSSQLVRDIQKAAKGIPVMGHSEGICHMYVDSEASVDKVTRLVRD | |
| | SKCEYPAACNALETLLIHRDLLRTPLFDQIIDMLRVEQVKIHAGPKF | |
| | ASYLTFSPSEVKSLRTEYGDLELCIEVVDNVQDAIDHIHKYGSSHTD | |
| | VIVTEDENTAEFFLQHVDSACVFWNASTRFSDGYRFGLGAEVGISTS | |
| | RIHARGPVGLEGLLTTKWLLRGKDHVVSDFSEHGSLKYLHENLPIP | |
| | QRNTN | |
| 178 | MFSKLAHLQRFAVLSRGVHSSVASATSVATKKTVQGPPTSDDIFERE | OAT |
| | YKYGAHNYHPLPVALERGKGIYLWDVEGRKYFDFLSSYSAVNQGH | |
| | CHPKIVNALKSQVDKLTLTSRAFYNNVLGEYEEYITKLFNYHKVLP | |
| | MNTGVEAGETACKLARKWGYTVKGIQKYKAKIVFAAGNFWGRTL | |
| | SAISSSTDPTSYDGFGPFMPGFDIIPYNDLPALERALQDPNVAAFMVE | |
| | PIQGEAGVVVPDPGYLMGVRELCTRHQVLFIADEIQTGLARTGRWL | |
| | AVDYENVRPDIVLLGKALSGGLYPVSAVLCDDDIMLTIKPGEHGST | |
| | YGGNPLGCRVAIAALEVLEEENLAENADKLGIILRNELMKLPSDVVT | |
| | AVRGKGLLNAIVIKETKDWDAWKVCLRLRDNGLLAKPTHGDIIRFA | |
| | PPLVIKEDELRESIEIINKTILSF | |
| 179 | MLGRNTWKTSAFSFLVEQMWAPLWSRSMRPGRWCSQRSCAWQTS | CA5A |
| | NNTLHPLWTVPVSVPGGTRQSPINIQWRDSVYDPQLKPLRVSYEAA | |
| | SCLYIWNTGYLFQVEFDDATEASGISGGPLENHYRLKQFHFHWGAV | |
| | NEGGSEHTVDGHAYPAELHLVHWNSVKYQNYKEAVVGENGLAVI | |
| | GVFLKLGAHHQTLQRLVDILPEIKHKDARAAMRPFDPSTLLPTCWD | |
| | YWTYAGSLTTPPLTESVTWIIQKEPVEVAPSQLSAFRTLLFSALGEEE | |
| | KMMVNNYRPLQPLMNRKVWASFQATNEGTRS | |
| 180 | MYRYLGEALLLSRAGPAALGSASADSAALLGWARGQPAAAPQPGL | GLUD1 |
| | ALAARRHYSEAVADREDDPNFFKMVEGFFDRGASIVEDKLVEDLRT | |
| | RESEEQKRNRVRGILRIIKPCNHVLSLSFPIRRDDGSWEVIEGYRAQH | |
| | SQHRTPCKGGIRYSTDVSVDEVKALASLMTYKCAVVDVPFGGAKA | |
| | GVKINPKNYTDNELEKITRRFTMELAKKGFIGPGIDVPAPDMSTGER | |
| | EMSWIADTYASTIGHYDINAHACVTGKPISQGGIHGRISATGRGVFH | |
| | GIENFINEASYMSILGMTPGFG | |
| | DKTFVVQGFGNVGLHSMRYLHRFGAKCIAVGESDGSIWNPDGIDPK | |
| | ELEDFKLQHGSILGFPKAKPYEGSILEADCDILIPAASEKQLTKSNAP | |
| | RVKAKIIAEGANGPTTPEADKIFLERNIMVIPDLYLNAGGVTVSYFE | |
| | WLKNLNHVSYGRLTFKYERDSNYHLLMSVQESLERKFGKHGGTIPI | |
| | VPTAEFQDRISGASEKDIVHSGLAYTMERSARQIMRTAMKYNLGLD | |
| | LRTAAYVNAIEKVFKVYNEAGVTFT | |
| 181 | MTTSASSHLNKGIKQVYMSLPQGEKVQAMYIWIDGTGEGLRCKTR | GLUL |
| | TLDSEPKCVEELPEWNFDGSSTLQSEGSNSDMYLVPAAMFRDPFRK | |
| | DPNKLVLCEVFKYNRRPAETNLRHTCKRIMDMVSNQHPWFGMEQE | |
| | YTLMGTDGHPFGWPSNGFPGPQGPYYCGVGADRAYGRDIVEAHYR | |
| | ACLYAGVKIAGTNAEVMPAQWEFQIGPCEGISMGDHLWVARFILH | |
| | RVCEDFGVIATFDPKPIPGNWNGAGCHTNFSTKAMREENGLKYIEE | |
| | AIEKLSKRHQYHIRAYDPKGGLDNARRLTGFHETSNINDFSAGVAN | |
| | RSASIRIPRTVGQEKKGYFEDRRPSANCDPFSVTEALIRTCLLNETGD | |
| | EPFQYKN | |
| 182 | MAVARAALGPLVTGLYDVQAFKFGDFVLKSGLSSPIYIDLRGIVSRP | UMPS |
| | RLLSQVADILFQTAQNAGISFDTVCGVPYTALPLATVICSTNQIPMLI | |
| | RRKETKDYGTKRLVEGTINPGETCLIIEDVVTSGSSVLETVEVLQKE | |
| | GLKVTDAIVLLDREQGGKDKLQAHGIRLHSVCTLSKMLEILEQQKK | |
| | VDAETVGRVKRFIQENVFVAANHNGSPLSIKEAPKELSFGARAELPR | |
| | IHPVA | |
| | SKLLRLMQKKETNLCLSADVSLARELLQLADALGPSICMLKTHVDI | |
| | LNDFTLDVMKELITLAKCHEFLIFEDRKFADIGNTVKKQYEGGIFKIA | |
| | SWADLVNAHVVPGSGVVKGLQEVGLPLHRGCLLIAEMSSTGSLAT | |
| | GDYTRAAVRMAEEHSEFVVGFISGSRVSMKPEFLHLTPGVQLEAGG | |
| | DNLGQQYNSPQEVIGKRGSDIIIVGRGIISAADRLEAAEMYRKAAWE | |
| | AYLSRLGV | |
| 183 | MRDYDEVTAFLGEWGPFQRLIFFLLSASIIPNGFTGLSSVFLIATPEHR | SLC22A5 |
| | CRVPDAANLSSAWRNHTVPLRLRDGREVPHSCRRYRLATIANFSAL | |
| | GLEPGRDVDLGQLEQESCLDGWEFSQDVYLSTIVTEWNLVCEDDW | |
| | KAPLTISLFFVGVLLGSFISGQLSDRFGRKNVLFVTMGMQTGFSFLQI | |
| | FSKNFEMFVVLFVLVGMGQISNYVAAFVLGTEILGKSVRIIFSTLGV | |
| | CIFYAFGYMVLPLFAYFIRDWRMLLVALTMPGVLCVALWWFIPESP | |
| | RWLISQGRFEEAEVIIRKAAKANGIVVPSTIFDPSELQDLSSKKQQSH | |
| | NILDLLRTWNIRMVTIMSIMLWMTISVGYFGLSLDTPNLHGDIFVNC | |
| | FLSAMVEVPAYVLAWLLLQYLPRRYSMATALFLGGSVLLFMQLVP | |
| | PDLYYLATVLVMVGKFGVTAAFSMVYVYTAELYPTVVRNMGVGV | |
| | SSTASRLGSILSPYFVYLGAYDRFLPYILMGSLTILTAILTLFLPESFGT | |
| | PLPDTIDQMLRVKGMKHRKTPSHTR | |
| | MLKDGQERPTILKSTAF | |
| 184 | MAEAHQAVAFQFTVTPDGIDLRLSHEALRQIYLSGLHSWKKKFIRF | CPT1A |
| | KNGIITGVYPASPSSWLIVVVGVMTTMYAKIDPSLGIIAKINRTLETA | |
| | NCMSSQTKNVVSGVLFGTGLWVALIVTMRYSLKVLLSYHGWMFTE | |
| | HGKMSRATKIWMGMVKIFSGRKPMLYSFQTSLPRLPVPAVKDTVN | |
| | RYLQSVRPLMKEEDFKRMTALAQDFAVGLGPRLQWYLKLKSWWA | |
| | TNYVSDWWEEYIYLRGRGPLMVNSNYYAMDLLYILPTHIQAARAG | |
| | NAIHAILLYRRKLDREEIKPIRLLGSTIPLCSAQWERMFNTSRIPGEET | |
| | DTIQHMRDSKHIVVYHRGRYFKVWLYHDGRLLKPREMEQQMQRIL | |
| | DNTSEPQPGEARLAALTAGDRVPWARCRQAYFGRGKNKQSLDAVE | |
| | KAAFFVTLDETEEGYRSEDPDTSMDSYAKSLLHGRCYDRWFDKSFT | |
| | FVVFKNGKMGLNAEHSWADAPIVAHLWEYVMSIDSLQLGYAEDG | |
| | HCKGDINPNIPYPTRLQWDIPGECQEVIETSLNTANLLANDVDFHSFP | |
| | FVAFGKGIIKKCRTSPDAFVQLALQLAHYKDMGKFCLTYEASMTRL | |
| | FREGRTETVRSCTTESCDFVRAMVDPAQTVEQRLKLFKLASEKHQH | |
| | MYRLAMTGSGIDRHLFCLYVVSKYLAVESPFLKEVLSEPWRLSTSQ | |
| | TPQQQVELFDLENNPEYVSSGGGFGPVADDGYGVSYILVGENLINF | |
| | HISSKFSCPETDSHRFGRHLKEAMTDIITLFGLSSNSKK | |
| 185 | MVACRAIGILSRFSAFRILRSRGYICRNFTGSSALLTRTHINYGVKGD | HADHA |
| | VAVVRINSPNSKVNTLSKELHSEFSEVMNEIWASDQIRSAVLISSKPG | |
| | CFIAGADINMLAACKTLQEVTQLSQEAQRIVEKLEKSTKPIVAAING | |
| | SCLGGGLEVAISCQYRIATKDRKTVLGTPEVLLGALPGAGGTQRLP | |
| | KMVGVPAALDMMLTGRSIRADRAKKMGLVDQLVEPLGPGLKPPEE | |
| | RTIEYLEEVAITFAKGLADKKISPKRDKGLVEKLTAYAMTIPFVRQQ | |
| | VYKKVEEKVRKQTKGLYPAPLKIIDVVKTGIEQGSDAGYLCESQKF | |
| | GELVMTKESKALMGLYHGQVLCKKNKFGAPQKDVKHLAILGAGL | |
| | MGAGIAQVSVDKGLKTILKDATLTALDRGQQQVFKGLNDKVKKKA | |
| | LTSFERDSIFSNLTGQLDYQGFEKADMVIEAVFEDLSLKHRVLKEVE | |
| | AVIPDHCIFASNTSALPISEIAAVSKRPEKVIGMHYFSPVDKMQLLEII | |
| | TTEKTSKDTSASAVAVGLKQGKVIIVVK | |
| | DGPGFYTTRCLAPMMSEVIRILQEGVDPKKLDSLTTSFGFPVGAATL | |
| | VDEVGVDVAKHVAEDLGKVFGERFGGGNPELLTQMVSKGFLGRKS | |
| | GKGFYIYQEGVKRKDLNSDMDSILASLKLPPKSEVSSDEDIQFRLVT | |
| | RFVNEAVMCLQEGILATPAEGDIGAVFGLGFPPCLGGPFRFVDLYG | |
| | AQKIVDRLKKYEAAYGKQFTPCQLLADHANSPNKKFYQ | |
| 186 | MAFVTRQFMRSVSSSSTASASAKKIIVKHVTVIGGGLMGAGIAQVA | HADH |
| | AATGHTVVLVDQTEDILAKSKKGIEESLRKVAKKKFAENLKAGDEF | |
| | VEKTLSTIATSTDAASVVHSTDLVVEAIVENLKVKNELFKRLDKFAA | |
| | EHTIFASNTSSLQITSIANATTRQDRFAGLHFFNPVPVMKLVEVIKTP | |
| | MTSQKTFESLVDFSKALGKHPVSCKDTPGFIVNRLLVPYLMEAIRLY | |
| | ERGDASKEDIDTAMKLGAGYPMGPFELLDYVGLDTTKFIVDGWHE | |
| | MDAENPLHQPSPSLNKLVAENKFGKKTGEGFYKYK | |
| 187 | MAAPTLGRLVLTHLLVALFGMGSWAAVNGIWVELPVVVKDLPEG | SLC52A1 |
| | WSLPSYLSVVVALGNLGLLVVTLWRQLAPGKGEQVPIQVVQVLSV | |
| | VGTALLAPLWHHVAPVAGQLHSVAFLTLALVLAMACCTSNVTFLP | |
| | FLSHLPPPFLRSFFLGQGLSALLPCVLALVQGVGRLECPPAPTNGTSG | |
| | PPLDFPERFPASTFFWALTALLVTSAAAFRGLLLLLPSLPSVTTGGSG | |
| | PELQLGSPGAEEEEKEEEEALPLQEPPSQAAGTIPGPDPEAHQLFSAH | |
| | GAFLLGLMAFTSAVTNGVLPSVQSFSCLPYGRLAYHLAVVLGSAAN | |
| | PLACFLAMGVLCRSLAGLVGLSLLGMLFGAYLMALAILSPCPPLVG | |
| | TTAGVVLVVLSWVLCLCVFSYVKVAASSLLHGGGRPALLAAGVAI | |
| | QVGSLLGAGAMFPPTSIYHVFQSRKDCVDPCGP | |
| 188 | MAAPTPARPVLTHLLVALFGMGSWAAVNGIWVELPVVVKELPEG | SLC52A2 |
| | WSLPSYVSVLVALGNLGLLVVTLWRRLAPGKDEQVPIRVVQVLGM | |
| | VGTALLASLWHHVAPVAGQLHSVAFLALAFVLALACCASNVTFLP | |
| | FLSHLPPRFLRSFFLGQGLSALLPCVLALVQGVGRLECPPAPINGTPG | |
| | PPLDFLERFPASTFFWALTALLVASAAAFQGLLLLLPPPPSVPTGELG | |
| | SGLQVGAPGAEEEVEESSPLQEPPSQAAGTTPGPDPKAYQLLSARSA | |
| | CLLGLLAATNALTNGVLPAVQSFSCLPYGRLAYHLAVVLGSAANPL | |
| | ACFLAMGVLCRSLAGLGGLSLLGVFCGGYLMALAVLSPCPPLVGTS | |
| | AGVVLVVLSWVLCLGVFSYVKVAASSLLHGGGRPALLAAGVAIQV | |
| | GSLLGAVAMFPPTSIYHVFHSRKDCADPCDS | |
| 189 | MAFLMHLLVCVFGMGSWVTINGLWVELPLLVMELPEGWYLPSYLT | SLC52A3 |
| | VVIQLANIGPLLVTLLHHFRPSCLSEVPIIFTLLGVGTVTCIIFAFLWN | |
| | MTSWVLDGHHSIAFLVLTFFLALVDCTSSVTFLPFMSRLPTYYLTTF | |
| | FVGEGLSGLLPALVALAQGSGLTTCVNVTEISDSVPSPVPTRETDIAQ | |
| | GVPRALVSALPGMEAPLSHLESRYLPAHFSPLVFFLLLSIMMACCLV | |
| | AFFV | |
| | LQRQPRCWEASVEDLLNDQVTLHSIRPREENDLGPAGTVDSSQGQG | |
| | YLEEKAAPCCPAHLAFIYTLVAFVNALTNGMLPSVQTYSCLSYGPV | |
| | AYHLAATLSIVANPLASLVSMFLPNRSLLFLGVLSVLGTCFGGYNM | |
| | AMAVMSPCPLLQGHWGGEVLIVASWVLFSGCLSYVKVMLGVVLR | |
| | DLSRSALLWCGAAVQLGSLLGALLMFPLVNVLRLFSSADFCNLHCP | |
| | A | |
| 190 | MTILTYPFKNLPTASKWALRFSIRPLSCSSQLRAAPAVQTKTKKTLA | HADHB |
| | KPNIRNVVVVDGVRTPFLLSGTSYKDLMPHDLARAALTGLLHRTSV | |
| | PKEVVDYIIFGTVIQEVKTSNVAREAALGAGFSDKTPAHTVTMACIS | |
| | ANQAMTTGVGLIASGQCDVIVAGGVELMSDVPIRHSRKMRKLMLD | |
| | LNKAKSMGQRLSLISKFRFNFLAPELPAVSEFSTSETMGHSADRLAA | |
| | AFAVSRLEQDEYALRSHSLAKKAQDEGLLSDVVPFKVPGKDTVTK | |
| | DNGIRPSSLEQMAKLKPAFIKPY | |
| | GTVTAANSSFLTDGASAMLIMAEEKALAMGYKPKAYLRDFMYVSQ | |
| | DPKDQLLLGPTYATPKVLEKAGLTMNDIDAFEFHEAFSGQILANFK | |
| | AMDSDWFAENYMGRKTKVGLPPLEKFNNWGGSLSLGHPFGATGC | |
| | RLVMAAANRLRKEGGQYGLVAACAAGGQGHAMIVEAYPK | |
| 191 | MLRGRSLSVTSLGGLPQWEVEELPVEELLLFEVAWEVTNKVGGIYT | GYS2 |
| | VIQTKAKTTADEWGENYFLIGPYFEHNMKTQVEQCEPVNDAVRRA | |
| | VDAMNKHGCQVHFGRWLIEGSPYVVLFDIGYSAWNLDRWKGDLW | |
| | EACSVGIPYHDREANDMLIFGSLTAWFLKEVTDHADGKYVVAQFH | |
| | EWQAGIGLILSRARKLPIATIFTTHATLLGRYLCAANIDFYNHLDKFN | |
| | IDKEAGERQIYHRYCMERASVHCAHVFTTVSEITAIEAEHMLKRKP | |
| | DVVTPNGLNVKKFSAVHEFQNLHAMYKARIQDFVRGHFYGHLDFD | |
| | LEKTLFLFIAGRYEFSNKGADIFLESLSRLNFLLRMHKSDITVMVFFI | |
| | MPAKTNNFNVETLKGQAVRKQLWDVAHSVKEKFGKKLYDALLRG | |
| | EIPDLNDILDRDDLTIMKRAIFSTQRQSLPPVTTHNMIDDSTDPILSTI | |
| | RRIGLFNNRTDRVKVILHPEFLSSTSPLLPMDYEEFVRGCHLGVFPSY | |
| | YEPWGYTPAECTVMGIPSVTTNLSGFGCFMQEHVADPTAYGIYIVD | |
| | RRFRSPDDSCNQLTKFLYGFCKQSRRQRIIQRNRTERLSDLLDWRYL | |
| | GRYYQHARHLTLSRAFPDKFHVELTSPPTTEGFKYPRPSSVPPSPSGS | |
| | QASSPQSSDVEDEVEDERYDEEEEAERDRLNIKSPFSLSHVPHGKKK | |
| | LHGEYKN | |
| 192 | MAKPLTDQEKRRQISIRGIVGVENVAELKKSFNRHLHFTLVKDRNV | PYGL |
| | ATTRDYYFALAHTVRDHLVGRWIRTQQHYYDKCPKRVYYLSLEFY | |
| | MGRTLQNTMINLGLQNACDEAIYQLGLDIEELEEIEEDAGLGNGGL | |
| | GRLAACFLDSMATLGLAAYGYGIRYEYGIFNQKIRDGWQVEEADD | |
| | WLRYGNPWEKSRPEFMLPVHFYGKVEHTNTGTKWIDTQVVLALPY | |
| | DTPVPGYMNNTVNTMRLWSARAPNDFNLRDFNVGDYIQAVLDRN | |
| | LAENISRVLYPNDNFFEGKELRLKQEYFVVAATLQDIIRRFKASKFG | |
| | STRGAGTVFDAFPDQVAIQLNDTHPALAIPELMRIFVDIEKL | |
| | PWSKAWELTQKTFAYTNHTVLPEALERWPVDLVEKLLPRHLEIIYEI | |
| | NQKHLDRIVALFPKDVDRLRRMSLIEEEGSKRINMAHLCIVGSHAV | |
| | NGVAKIHSDIVKTKVFKDFSELEPDKFQNKTNGITPRRWLLLCNPGL | |
| | AELIAEKIGEDYVKDLSQLTKLHSFLGDDVFLRELAKVKQENKLKFS | |
| | QFLETEYKVKINPSSMFDVQVKRIHEYKRQLLNCLHVITMYNRIKK | |
| | DPKKLFVPRTVIIGGKAAPGYHMAKMIIKLITSVADVVNNDPMVGS | |
| | KLKVIFLENYRVSLAEKVIPATDLSEQISTAGTEASGTGNMKFMLNG | |
| | ALTIGTMDGANVEMAEEAGEENLFIFGMRIDDVAALDKKGYEAKE | |
| | YYEALPELKLVIDQIDNGFFSPKQPDLFKDIINMLFYHDRFKVFADY | |
| | EAYVKCQDKVSQLYMNPKAWNTMVLKNIAASGKFSSDRTIKEYAQ | |
| | NIWNVEPSDLKISLSNESNKVNGN | |
| 193 | MTEDKVTGTLVFTVITAVLGSFQFGYDIGVINAPQQVIISHYRHVLG | SLC2A2 |
| | VPLDDRKAINNYVINSTDELPTISYSMNPKPTPWAEEETVAAAQLIT | |
| | MLWSLSVSSFAVGGMTASFFGGWLGDTLGRIKAMLVANILSLVGA | |
| | LLMGFSKLGPSHILIIAGRSISGLYCGLISGLVPMYIGEIAPTALRGAL | |
| | GTFHQLAIVTGILISQIIGLEFILGNYDLWHILLGLSGVRAILQSLLLFF | |
| | CPESPRYLYIKLDEEVKAKQSLKRLRGYDDVTKDINEMRKEREEAS | |
| | SEQKVSIIQLFTNSSYRQPILVALMLHVAQQFSGINGIFYYSTSIFQTA | |
| | GISKPVYATIGVGAVNMVFTAVSVFLVEKAGRRSLFLIGMSGMFVC | |
| | AIFMSVGLVLLNKFSWMSYVSMIAIFLFVSFFEIGPGPIPWFMVAEFF | |
| | SQGPRPAALAIAAFSNWTCNFIVALCFQYIADFCGPYVFFLFAGVLL | |
| | AFTLFTFFKVPETKGKSFEEIAAEFQKKSGSAHRPKAAVEMKFLGAT | |
| | ETV | |
| 194 | MAASCLVLLALCLLLPLLLLGGWKRWRRGRAARHVVAVVLGDVG | ALG1 |
| | RSPRMQYHALSLAMHGFSVTLLGFCNSKPHDELLQNNRIQIVGLTE | |
| | LQSLAVGPRVFQYGVKVVLQAMYLLWKLMWREPGAYIFLQNPPG | |
| | LPSIAVCWFVGCLCGSKLVIDWHNYGYSIMGLVHGPNHPLVLLAK | |
| | WYEKFFGRLSHLNLCVTNAMREDLADNWHIRAVTVYDKPASFFKE | |
| | TPLDLQHRLFMKLGSMHSPFRARSEPEDPVTERSAFTERDAGSGLVT | |
| | RLRERPALLVSSTSWTEDEDFSILLAALEKFEQLTLDGHNLPSLVCVI | |
| | TGKGPLREYYSRLIHQKHFQHIQVCTPWLEAEDYPLLLGSADLGVC | |
| | LHTSSSGLDLPMKVVDMFGCCLPVCAVNFKCLHELVKHEENGLVF | |
| | EDSEELAAQLQMLFSNFPDPAGKLNQFRKNLRESQQLRWDESWVQ | |
| | TVLPLVMDT | |
| 195 | MAEEQGRERDSVPKPSVLFLHPDLGVGGAERLVLDAALALQARGC | ALG2 |
| | SVKIWTAHYDPGHCFAESRELPVRCAGDWLPRGLGWGGRGAAVC | |
| | AYVRMVFLALYVLFLADEEFDVVVCDQVSACIPVFRLARRRKKILF | |
| | YCHFPDLLLTKRDSFLKRLYRAPIDWIEEYTTGMADCILVNSQFTAA | |
| | VFKETFKSLSHIDPDVLYPSLNVTSFDSVVPEKLDDLVPKGKKFLLL | |
| | SINRYERKKNLTLALEALVQLRGRLTSQDWERVHLIVAGGYDERVL | |
| | ENVEHYQELKKMVQQSDLGQYVTFLRSFSDKQKISLLHSCTCVLYT | |
| | PSNEHFGIVPLEAMYMQCPVIAVNSGGPLESIDHSVTGFLCEPDPVH | |
| | FSEAIEKFIREPSLKATMGLAGRARVKEKFSPEAFTEQLYRYVTKLL | |
| | V | |
| 196 | MAAGLRKRGRSGSAAQAEGLCKQWLQRAWQERRLLLREPRYTLL | ALG3 |
| | VAACLCLAEVGITFWVIHRVAYTEIDWKAYMAEVEGVINGTYDYT | |
| | QLQGDTGPLVYPAGFVYIFMGLYYATSRGTDIRMAQNIFAVLYLAT | |
| | LLLVFLIYHQTCKVPPFVFFFMCCASYRVHSIFVLRLFNDPVAMVLL | |
| | FLSINLLLAQRWGWGCCFFSLAVSVKMNVLLFAPGLLFLLLTQFGF | |
| | RGALPKLGICAGLQVVLGLPFLLENPSGYLSRSFDLGRQFLFHWTVN | |
| | WRFLPEALFLHRAFHLALLTAHLTL | |
| | LLLFALCRWHRTGESILSLLRDPSKRKVPPQPLTPNQIVSTLFTSNFIG | |
| | ICFSRSLHYQFYVWYFHTLPYLLWAMPARWLTHLLRLLVLGLIELS | |
| | WNTYPSTSCSSAALHICHAVILLQLWLGPQPFPKSTQHSKKAH | |
| 197 | MEKWYLMTVVVLIGLTVRWTVSLNSYSGAGKPPMFGDYEAQRHW | ALG6 |
| | QEITFNLPVKQWYFNSSDNNLQYWGLDYPPLTAYHSLLCAYVAKFI | |
| | NPDWIALHTSRGYESQAHKLFMRTTVLIADLLIYIPAVVLYCCCLKE | |
| | ISTKKKIANALCILLYPGLILIDYGHFQYNSVSLGFALWGVLGISCDC | |
| | DLLGSLAFCLAINYKQMELYHALPFFCFLLGKCFKKGLKGKGFVLL | |
| | VKLACIVVASFVLCWLPFFTEREQTLQVLRRLFPVDRGLFEDKVANI | |
| | WCSFNVFLKIKDILPRHIQLIMSFCSTFLSLLPACIKLILQPSSKGFKFT | |
| | LVSCALSFFLFSFQVHEKSILLVSLPVCLVLSEIPFMSTWFLLVSTFSM | |
| | LPLLLKDELLMPSVVTTMAFFIACVTSFSIFEKTSEEELQLKSFSISVR | |
| | KYLPCFTFLSRIIQYLFLISVITMVLLTLMTVTLDPPQKLPDLFSVLVC | |
| | FVSCLNFLFFLVYFNIIIMWDSKSGRNQKKIS | |
| 198 | MAALTIATGTGNWFSALALGVTLLKCLLIPTYHSTDFEVHRNWLAI | ALG8 |
| | THSLPISQWYYEATSEWTLDYPPFFAWFEYILSHVAKYFDQEMLNV | |
| | HNLNYSSSRTLLFQRFSVIFMDVLFVYAVRECCKCIDGKKVGKELTE | |
| | KPKFILSVLLLWNFGLLIVDHIHFQYNGFLFGLMLLSIARLFQKRHM | |
| | EGAFLFAVLLHFKHIYLYVAPAYGVYLLRSYCFTANKPDGSIRWKS | |
| | FSFVRVISLGLVVFLVSALSLGPFLALNQLPQVFSRLFPFKRGLCHAY | |
| | WAPNFWALYNALDKVLSVIGLKLKFLDPNNIPKASMTSGLVQQFQ | |
| | HTVLPSVTPLATLICTLIAILPSIFCLWFKPQGPRGFLRCLTLCALSSF | |
| | MFGWHVHEKAILLAILPMSLLSVGKAGDASIFLILTTTGHYSLFPLLF | |
| | TAPELPIKILLMLLFTIYSISSLKTLFRKEKPLFNWMETFYLLGLGPLE | |
| | VCCEFVFPFTSWKVKYPFIPLLLTSVYCAVGITYAWFKLYVSVLIDS | |
| | AIGKTKKQ | |
| 199 | MASRGARQRLKGSGASSGDTAPAADKLRELLGSREAGGAEHRTEL | ALG9 |
| | SGNKAGQVWAPEGSTAFKCLLSARLCAALLSNISDCDETFNYWEPT | |
| | HYLIYGEGFQTWEYSPAYAIRSYAYLLLHAWPAAFHARILQTNKILV | |
| | FYFLRCLLAFVSCICELYFYKAVCKKFGLHVSRMMLAFLVLSTGMF | |
| | CSSSAFLPSSFCMYTTLIAMTGWYMDKTSIAVLGVAAGAILGWPFS | |
| | AALGLPIAFDLLVMKHRWKSFFHWSLMALILFLVPVVVIDSYYYGK | |
| | LVIAPLNIVLYNVFTPHGPDLYGT | |
| | EPWYFYLINGFLNFNVAFALALLVLPLTSLMEYLLQRFHVQNLGHP | |
| | YWLTLAPMYIWFIIFFIQPHKEERFLFPVYPLICLCGAVALSALQKCY | |
| | HFVFQRYRLEHYTVTSNWLALGTVFLFGLLSFSRSVALFRGYHGPL | |
| | DLYPEFYRIATDPTIHTVPEGRPVNVCVGKEWYRFPSSFLLPDNWQL | |
| | QFIPSEFRGQLPKPFAEGPLATRIVPTDMNDQNLEEPSRYIDISKCHY | |
| | LVDLDTMRETPREPKYSSNKEEWISLAYRPFLDASRSSKLLRAFYVP | |
| | FLSDQYTVYVNYTILKPRKAKQIRKKSGG | |
| 200 | MAAGERSWCLCKLLRFFYSLFFPGLIVCGTLCVCLVIVLWGIRLLLQ | ALG11 |
| | RKKKLVSTSKNGKNQMVIAFFHPYCNAGGGGERVLWCALRALQK | |
| | KYPEAVYVVYTGDVNVNGQQILEGAFRRFNIRLIHPVQFVFLRKRY | |
| | LVEDSLYPHFTLLGQSLGSIFLGWEALMQCVPDVYIDSMGYAFTLPL | |
| | FKYIGGCQVGSYVHYPTISTDMLSVVKNQNIGFNNAAFITRNPFLSK | |
| | VKLIYYYLFAHYGLVGSCSDVVMVNSSWTLNHILSLWKVGNCTNI | |
| | VYPPCDVQTFLDIPLHEKKMTPGHLLVSVGQFRPEKNHPLQIRAFAK | |
| | LLNKKMVESPPSLKLVLIGGCRNKDDELRVNQLRRLSEDLGVQEYV | |
| | EFKINIPFDELKNYLSEATIGLHTMWNEHFGIGVVECMAAGTIILAH | |
| | NSGGPKLDIVVPHEGDITGFLAESEEDYAETIAHILSMSAEKRLQIRK | |
| | SARASVSRFSDQEFEVTFLSSVEKLFK | |
| 201 | MAGKGSSGRRPLLLGLLVAVATVHLVICPYTKVEESFNLQATHDLL | ALG12 |
| | YHWQDLEQYDHLEFPGVVPRTFLGPVVIAVFSSPAVYVLSLLEMSK | |
| | FYSQLIVRGVLGLGVIFGLWTLQKEVRRHFGAMVATMFCWVTAM | |
| | QFHLMFYCTRTLPNVLALPVVLLALAAWLRHEWARFIWLSAFAIIV | |
| | FRVELCLFLGLLLLLALGNRKVSVVRALRHAVPAGILCLGLTVAVD | |
| | SYFWRQLTWPEGKVLWYNTVLNKSSNWGTSPLLWYFYSALPRGL | |
| | GCSLLFIPLGLVDRRTHAPTVLALGFMALYSLLPHKELRFIIYAFPML | |
| | NITAARGCSYLLNNYKKSWLYKAGSLLVIGHLVVNAAYSATALYV | |
| | SHFNYPGGVAMQRLHQLVPPQTDVLLHIDVAAAQTGVSRFLQVNS | |
| | AWRYDKREDVQPGTGMLAYTHILMEAAPGLLALYRDTHRVLASV | |
| | VGTTGVSLNLTQLPPFNVHLQTKLVLLERLPRPS | |
| 202 | MKCVFVTVGTTSFDDLIACVSAPDSLQKIESLGYNRLILQIGRGTVV | ALG13 |
| | PEPFSTESFTLDVYRYKDSLKEDIQKADLVISHAGAGSCLETLEKGK | |
| | PLVVVINEKLMNNHQLELAKQLHKEGHLFYCTCRVLTCPGQAKSIA | |
| | SAPGKCQDSAALTSTAFSGLDFGLLSGYLHKQALVTATHPTCTLLFP | |
| | SCHAFFPLPLTPTLYKMHKGWKNYCSQKSLNEASMDEYLGSLGLFR | |
| | KLTAKDASCLFRAISEQLFCSQVHHLEIRKACVSYMRENQQTFESYV | |
| | EGSFEKYLERLGDPKESAGQLEIRALSLIYNRDFILYRFPGKPPTYVT | |
| | DNGYEDKILLCYSSSGHYDSVYSKQFQSSAAVCQAVLYEILYKDVF | |
| | VVDEEELKTAIKLFRSGSKKNRNNAVTGSEDAHTDYKSSNQNRME | |
| | EWGACYNAENIPEGYNKGTEETKSPENPSKMPFPYKVLKALDPEIY | |
| | RNVEFDVWLDSRKELQKSDYMEYAGRQYYLGDKCQVCLESEGRY | |
| | YNAHIQEVGNENNSVTVFIEELAEKHVVPLANLKPVTQVMSVPAW | |
| | NAMPSRKGRGYQKMPGGYVPEIVISEMDIKQQKKMFKKIRGKEVY | |
| | M | |
| | TMAYGKGDPLLPPRLQHSMHYGHDPPMHYSQTAGNVMSNEHFHP | |
| | QHPSPRQGRGYGMPRNSSRFINRHNMPGPKVDFYPGPGKRCCQSYD | |
| | NFSYRSRSFRRSHRQMSCVNKESQYGFTPGNGQMPRGLEETITFYE | |
| | VEEGDETAYPTLPNHGGPSTMVPATSGYCVGRRGHSSGKQTLNLEE | |
| | GNGQSENGRYHEEYLYRAEPDYETSGVYSTTASTANLSLQDRKSCS | |
| | MSPQDTVTSYNYPQKMMGNIAAVAASCANNVPAPVLSNGAAANQ | |
| | AISTTSVSSQNAIQPLFVSPPTHGRPVIASPSYPCHSAIPHAGASLPPPP | |
| | PPPPPPPPPPPPPPPPPPPPPPPALDVGETSNLQPPPPLPPPPYSCDPSGS | |
| | DLPQDTKVLQYYFNLGLQCYYHSYWHSMVYVPQMQQQLHVENYP | |
| | VYTEPPLVDQTVPQCYSEVRREDGIQAEASANDTFPNADSSSVPHG | |
| | AVYYPVMSDPYGQPPLPGFDSCLPVVPDYSCVPPWHPVGTAYGGSS | |
| | QIHGAINPGPIGCIAPSPPASHYVPQGM | |
| 203 | MGSLFRSETMCLAQLFLQSGTAYECLSALGEKGLVQFRDLNQNVSS | ATP6V0A2 |
| | FQRKFVGEVKRCEELERILVYLVQEINRADIPLPEGEASPPAPPLKQV | |
| | LEMQEQLQKLEVELREVTKNKEKLRKNLLELIEYTHMLRVTKTFVK | |
| | RNVEFEPTYEEFPSLESDSLLDYSCMQRLGAKLGFVSGLINQGKVEA | |
| | FEKMLWRVCKGYTIVSYAELDESLEDPETGEVIKWYVFLISFWGEQI | |
| | GHKVKKICDCYHCHVYPYPNTAEERREIQEGLNTRIQDLYTVLHKT | |
| | EDYLRQVLCKAAESVYSRVIQVKKMKAIYHMLNMCSFDVTNKCLI | |
| | AEVWCPEADLQDLRRALEEGSRESGATIPSFMNIIPTKETPPTRIRTN | |
| | KFTEGFQNIVDAYGVGSYREVNPALFTIITFPFLFAVMFGDFGHGFV | |
| | MFLFALLLVLNENHPRLNQSQEIMRMFFNGRYILLLMGLFSVYTGLI | |
| | YNDCFSKSVNLFGSGWNVSAMYSSSHPPAEHKKMVLWNDSVVRH | |
| | NSILQLDPSIPGVFRGPYPLGIDPIWNLATNRLTFLNSFKMKMSVILGI | |
| | IHMTFGVILGIFNHLHFRKKFNIYLVSIPELLFMLCIFGYLIFMIFYKW | |
| | LVFSAETSRVAPSILIEFINMFLFPASKTSGLYTGQEYVQRVLLVVTA | |
| | LSVPVLFLGKPLFLLWLHNGRSCFGVNRSGYTLIRKDSEEEVSLLGS | |
| | QDIEEGNHQVEDGCREMACEEFNFGEILMTQVIHSIEYCLGCISNTA | |
| | SYLRLWALSLAHAQLSDVLWAMLMRVGLRVDTTYGVLLLLPVIAL | |
| | FAVLTIFILLIMEGLSAFLHAIRLHWVEFQNKFYVGAGTKFVPF | |
| | SFSLLSSKFNNDDSVA | |
| 204 | MRPPACWWLLAPPALLALLTCSLAFGLASEDTKKEVKQSQDLEKS | B3GLCT |
| | GISRKNDIDLKGIVFVIQSQSNSFHAKRAEQLKKSILKQAADLTQELP | |
| | SVLLLHQLAKQEGAWTILPLLPHFSVTYSRNSSWIFFCEEETRIQIPK | |
| | LLETLRRYDPSKEWFLGKALHDEEATIIHHYAFSENPTVFKYPDFAA | |
| | GWALSIPLVNKLTKRLKSESLKSDFTIDLKHEIALYIWDKGGGPPLTP | |
| | VPEF | |
| | CTNDVDFYCATTFHSFLPLCRKPVKKKDIFVAVKTCKKFHGDRIPIV | |
| | KQTWESQASLIEYYSDYTENSIPTVDLGIPNTDRGHCGKTFAILERFL | |
| | NRSQDKTAWLVIVDDDTLISISRLQHLLSCYDSGEPVFLGERYGYGL | |
| | GTGGYSYITGGGGMVFSREAVRRLLASKCRCYSNDAPDDMVLGMC | |
| | FSGLGIPVTHSPLFHQARPVDYPKDYLSHQVPISFHKHWNIDPVKVY | |
| | FTWLAPSDEDKARQETQKGFREEL | |
| 205 | MFPRPLTPLAAPNGAEPLGRALRRAPLGRARAGLGGPPLLLPSMLM | CHST14 |
| | FAVIVASSGLLLMIERGILAEMKPLPLHPPGREGTAWRGKAPKPGGL | |
| | SLRAGDADLQVRQDVRNRTLRAVCGQPGMPRDPWDLPVGQRRTL | |
| | LRHILVSDRYRFLYCYVPKVACSNWKRVMKVLAGVLDSVDVRLK | |
| | MDHRSDLVFLADLRPEEIRYRLQHYFKFLFVREPLERLLSAYRNKFG | |
| | EIREYQQRYGAEIVRRYRAGAGPSPAGDDVTFPEFLRYLVDEDPER | |
| | MNEHWMPVYHLCQPCAVHYDFVGSYERLEADANQVLEWVRAPPH | |
| | VRFPARQAWYRPASPESLHYHLCSAPRALLQDVLPKYILDFSLFAYP | |
| | LPNVTKEACQQ | |
| 206 | MATAATSPALKRLDLRDPAALFETHGAEEIRGLERQVRAEIEHKKE | COG1 |
| | ELRQMVGERYRDLIEAADTIGQMRRCAVGLVDAVKATDQYCARLR | |
| | QAGSAAPRPPRAQQPQQPSQEKFYSMAAQIKLLLEIPEKIWSSMEAS | |
| | QCLHATQLYLLCCHLHSLLQLDSSSSRYSPVLSRFPILIRQVAAASHF | |
| | RSTILHESKMLLKCQGVSDQAVAEALCSIMLLEESSPRQALTDFLLA | |
| | RKATIQKLLNQPHHGAGIKAQICSLVELLATTLKQAHALFYTLPEGL | |
| | LPDPALPCGLLFSTLETITGQHPAGKGTGVLQEEMKLCSWFKHLPAS | |
| | IVEFQPTLRTLAHPISQEYLKDTLQKWIHMCNEDIKNGITNLLMYVK | |
| | SMKGLAGIRDAMWELLTNESTNHSWDVLCRRLLEKPLLFWEDMM | |
| | QQLFLDRLQTLTKEGFDSISSSSKELLVSALQELESSTSNSPSNKHIHF | |
| | EYNMSLFLWSESPNDLPSDAAWVSVANRGQFASSGLSMKAQAISPC | |
| | VQNFCSALDSKLKVKLDDLLAYLPSDD | |
| | SSLPKDVSPTQAKSSAFDRYADAGTVQEMLRTQSVACIKHIVDCIRA | |
| | ELQSIEEGVQGQQDALNSAKLHSVLFMARLCQSLGELCPHLKQCIL | |
| | GKSESSEKPAREFRALRKQGKVKTQEIIPTQAKWQEVKEVLLQQSV | |
| | MGYQVWSSAVVKVLIHGFTQSLLLDDAGSVLATATSWDELEIQEEA | |
| | ESGSSVTSKIRLPAQPSWYVQSFLFSLCQEINRVGGHALPKVTLQEM | |
| | LKSCMVQVVAAYEKLSEEKQIKKEGAFPVTQNRALQLLYDLRYLNI | |
| | VLTAKGDEVKSGRSKPDSRIEK | |
| | VTDHLEALIDPFDLDVFTPHLNSNLHRLVQRTSVLFGLVTGTENQLA | |
| | PRSSTFNSQEPHNILPLASSQIRFGLLPLSMTSTRKAKSTRNIETKAQV | |
| | VPPARSTAGDPTVPGSLFRQLVSEEDNTSAPSLFKLGWLSSMTK | |
| 207 | MEKSRMNLPKGPDTLCFDKDEFMKEDFDVDHFVSDCRKRVQLEEL | COG2 |
| | RDDLELYYKLLKTAMVELINKDYADFVNLSTNLVGMDKALNQLSV | |
| | PLGQLREEVLSLRSSVSEGIRAVDERMSKQEDIRKKKMCVLRLIQVI | |
| | RSVEKIEKILNSQSSKETSALEASSPLLTGQILERIATEFNQLQFHAVQ | |
| | SKGMPLLDKVRPRIAGITAMLQQSLEGLLLEGLQTSDVDIIRHCLRT | |
| | YATIDKTRDAEALVGQVLVKPYIDEVIIEQFVESHPNGLQVMYNKLL | |
| | EFVPHHCRLLREVTGGAISSEKGNTVPGYDFLVNSVWPQIVQGLEE | |
| | KLPSLFNPGNPDAFHEKYTISMDFVRRLERQCGSQASVKRLRAHPA | |
| | YHSFNKKWNLPVYFQIRFREIAGSLEAALTDVLEDAPAESPYCLLAS | |
| | HRTWSSLRRCWSDEMFLPLLVHRLWRLTLQILARYSVFVNELSLRPI | |
| | SNESPKEIKKPLVTGSKEPSITQGNTEDQGSGPSETKPVVSISRTQLV | |
| | YVVADLDKLQEQLPELLEIIKPKLEMIGFKNFSSISAALEDSQSSFSA | |
| | CVPSLSSKIIQDLSDSCFGFLKSALEVPRLYRRTNKEVPTTASSYVDS | |
| | ALKPLFQLQSGHKDKLKQAIIQQWLEGTLSESTHKYYETVSDVLNS | |
| | VKKMEESLKRLKQARKTTPANPVGPSGGMSDDDKIRLQLALDVEY | |
| | LGEQIQKLGLQASDIKSFSALAELVAAAKDQATAEQP | |
| 208 | MADLDSPPKLSGVQQPSEGVGGGRCSEISAELIRSLTELQELEAVYE | COG4 |
| | RLCGEEKVVERELDALLEQQNTIESKMVTLHRMGPNLQLIEGDAKQ | |
| | LAGMITFTCNLAENVSSKVRQLDLAKNRLYQAIQRADDILDLKFCM | |
| | DGVQTALRSEDYEQAAAHTHRYLCLDKSVIELSRQGKEGSMIDANL | |
| | KLLQEAEQRLKAIVAEKFAIATKEGDLPQVERFFKIFPLLGLHEEGLR | |
| | KFSEYLCKQVASKAEENLLMVLGTDMSDRRAAVIFADTLTLLFEGI | |
| | ARIVETHQPIVETYYGPGRLYTLIKYLQVECDRQVEKVVDKFIKQRD | |
| | YHQQFRHVQNNLMRNSTTEKIEPRELDPILTEVTLMNARSELYLRFL | |
| | KKRISSDFEVGDSMASEEVKQEHQKCLDKLLNNCLLSCTMQELIGL | |
| | YVTMEEYFMRETVNKAVALDTYEKGQLTSSMVDDVFYIVKKCIGR | |
| | ALSSSSIDCLCAMINLATTELESDFRDVLCNKLRMGFPATTFQDIQR | |
| | GVTSAVNIMHSSLQQGKFDTKGIESTDEAKMSFLVTLNNVEVCSENI | |
| | STLKKTLESDCTKLFSQGIGGEQAQAKFDSCLSDLAAVSNKFRDLLQ | |
| | EGLTELNSTAIKPQVQPWINSFFSVSHNIEEEEFNDYEANDPWVQQFI | |
| | LNLEQQMAEFKASLSPVIYDSLTGLMTSLVAVELEKVVLKSTFNRL | |
| | GGLQFDKELRSLIAYLTTVTTWTIRDKFARLSQMATILNLERVTEILD | |
| | YWGPNSGPLTWRLTPAEVRQVLALRIDFRSEDIKRLRL | |
| 209 | MGWVGGRRRDSASPPGRSRSAADDINPAPANMEGGGGSVAVAGL | COG5 |
| | GARGSGAAAATVRELLQDGCYSDFLNEDFDVKTYTSQSIHQAVIAE | |
| | QLAKLAQGISQLDRELHLQVVARHEDLLAQATGIESLEGVLQMMQ | |
| | TRIGALQGAVDRIKAKIVEPYNKIVARTAQLARLQVACDLLRRIIRIL | |
| | NLSKRLQGQLQGGSREITKAAQSLNELDYLSQGIDLSGIEVIENDLLF | |
| | IARARLEVENQAKRLLEQGLETQNPTQVGTALQVFYNLGTLKDTITS | |
| | VVDGYCATLEENINSALDIKVLTQPSQSAVRGGPGRSTMPTPGNTA | |
| | ALRASFWTNMEKLMDHIYAVCGQVQHLQKVLAKKRDPVSHICFIE | |
| | EIVKDGQPEIFYTFWNSVTQALSSQFHMATNSSMFLKQAFEGEYPK | |
| | LLRLYNDLWKRLQQYSQHIQGNFNASGTTDLYVDLQHMEDDAQDI | |
| | FIPKKPDYDPEKALKDSLQPYEAAYLSKSLSRLFDPINLVFPPGGRNP | |
| | PSSDELDGIIKTIASELNVAAVDTNLTLAVSKNVAKTIQLYSVKSEQL | |
| | LSTQGDASQVIGPLTEGQRRNVAVVNSLYKLHQSVTKAIHALMENA | |
| | VQPLLTSVGDAIEAIIITMHQEDFSGSLSSSGKPDVPCSLYMKELQGF | |
| | IARVMSDYFKHFECLDFVFDNTEAIAQRAVELFIRHASLIRPLGEGG | |
| | KMRLAADFAQMELAVGPFCRRVSDLGKSYRMLRSFRPLLFQASEH | |
| | VASSPALGDVIPFSIIIQFLFTRAPAELKSPFQRAEWSHTRFSQWLDD | |
| | HPSEKDRLLLIRGALEAYVQSVRSREGKEFAPVYPIMVQLLQKAMS | |
| | ALQ | |
| 210 | MAEGSGEVVAVSATGAANGLNNGAGGTSATTCNPLSRKLHKILET | COG6 |
| | RLDNDKEMLEALKALSTFFVENSLRTRRNLRGDIERKSLAINEEFVSI | |
| | FKEVKEELESISEDVQAMSNCCQDMTSRLQAAKEQTQDLIVKTTKL | |
| | QSESQKLEIRAQVADAFLSKFQLTSDEMSLLRGTREGPITEDFFKAL | |
| | GRVKQIHNDVKVLLRTNQQTAGLEIMEQMALLQETAYERLYRWAQ | |
| | SECRTLTQESCDVSPVLTQAMEALQDRPVLYKYTLDEFGTARRSTV | |
| | VRGFIDALTRGGPGGTPRPIEMHSHDPLRYVGDMLAWLHQATASE | |
| | KEHLEALLKHVTTQGVEENIQEVVGHITEGVCRPLKVRIEQVIVAEP | |
| | GAVLLYKISNLLKFYHHTISGIVGNSATALLTTIEEMHLLSKKIFFNS | |
| | LSLHASKLMDKVELPPPDLGPSSALNQTLMLLREVLASHDSSVVPL | |
| | DARQADFVQVLSCVLDPLLQMCTVSASNLGTADMATFMVNSLYM | |
| | MKTTLALFEFTDRRLEMLQFQIEAHLDTLINEQASYVLTRVGLSYIY | |
| | NTVQQHKPEQGSLANMPNLDSVTLKAAMVQFDRYLSAPDNLLIPQ | |
| | LNFLLSATVKEQIVKQSTELVCRAYGEVYAAVMNPINEYKDPENIL | |
| | HRSPQQVQTLLS | |
| 211 | MDFSKFLADDFDVKEWINAAFRAGSKEAASGKADGHAATLVMKL | COG7 |
| | QLFIQEVNHAVEETSHQALQNMPKVLRDVEALKQEASFLKEQMILV | |
| | KEDIKKFEQDTSQSMQVLVEIDQVKSRMQLAAESLQEADKWSTLSA | |
| | DIEETFKTQDIAVISAKLTGMQNSLMMLVDTPDYSEKCVHLEALKN | |
| | RLEALASPQIVAAFTSQAVDQSKVFVKVFTEIDRMPQLLAYYYKCH | |
| | KVQLLAAWQELCQSDLSLDRQLTGLYDALLGAWHTQIQWATQVF | |
| | QKPHEVVMVLLIQTLGALMPSLPSCLSNGVERAGPEQELTRLLEFY | |
| | DATAHFAKGLEMALLPHLHEHNLVKVTELVDAVYDPYKPYQLKY | |
| | GDMEESNLLIQMSAVPLEHGEVIDCVQELSHSVNKLFGLASAAVDR | |
| | CVRFTNGLGTCGLLSALKSLFAKYVSDFTSTLQSIRKKCKLDHIPPNS | |
| | LFQEDWTAFQNSIRIIATCGELLRHCGDFEQQLANRILSTAGKYLSDS | |
| | CSPRSLAGFQESILTDKKNSAKNPWQEYNYLQKDNPAEYASLMEIL | |
| | YTLKEKGSSNHNLLAAPRAALTRLNQQAHQLAFDSVFLRIKQQLLLI | |
| | SKMDSWNTAGIGETLTDELPAFSLTPLEYISNIGQYIMSLPLNLEPFV | |
| | TQEDSALELALHAGKLPFPPEQGDELPELDNMADNWLGSIARATM | |
| | QTYCDAILQIPELSPHSAKQLATDIDYLINVMDALGLQPSRTLQHIVT | |
| | LLKTRPEDYRQVSKGLPRRLATTVATMRSVNY | |
| 212 | MATAATIPSVATATAAALGEVEDEGLLASLFRDRFPEAQWRERPDV | COG8 |
| | GRYLRELSGSGLERLRREPERLAEERAQLLQQTRDLAFANYKTFIRG | |
| | AECTERIHRLFGDVEASLGRLLDRLPSFQQSCRNFVKEAEEISSNRR | |
| | MNSLTLNRHTEILEILEIPQLMDTCVRNSYYEEALELAAYVRRLERK | |
| | YSSIPVIQGIVNEVRQSMQLMLSQLIQQLRTNIQLPACLRVIGYLRRM | |
| | DVFTEAELRVKFLQARDAWLRSILTAIPNDDPYFHITKTIEASRVHLF | |
| | DIITQYRAIFSDEDPLLPPAMGEHTVNESAIFHGWVLQKVSQFLQVL | |
| | ETDLYRGIGGHLDSLLGQCMYFGLSFSRVGADFRGQLAPVFQRVAI | |
| | STFQKAIQETVEKFQEEMNSYMLISAPAILGTSNMPAAVPATQPGTL | |
| | QPPMVLLDFPPLACFLNNILVAFNDLRLCCPVALAQDVTGALEDAL | |
| | AKVTKIILAFHRAEEAAFSSGEQELFVQFCTVFLEDLVPYLNRCLQV | |
| | LFPPAQIAQTLGIPPTQLSKYGNLGHVNIGAIQEPLAFILPKRETLFTL | |
| | DDQALGPELTAPAPEPPAEEPRLEPAGPACPEGGRAETQAEPPSVGP | |
| 213 | DRLLQQGSAVFQFRMSANSGLLPASMVMPLLGLVMKERCQTAGNP | DOLK |
| | FFERFGIVVAATGMAVALFSSVLALGITRPVPTNTCVILGLAGGVIIY | |
| | IMKHSLSVGEVIEVLEVLLIFVYLNMILLYLLPRCFTPGEALLVLGGI | |
| | SFVLNQLIKRSLTLVESQGDPVDFFLLVVVVGMVLMGIFFSTLFVFM | |
| | DSGTWASSIFFHLMTCVLSLGVVLPWLHRLIRRNPLLWLLQFLFQTD | |
| | TRIYLLAYWSLLATLACLVVLYQNAKRSSSESKKHQAPTIARKYFH | |
| | LIVVATYIPGIIFDRPLLYVAATVCLAVFIFLEYVRYFRIKPLGHTLRS | |
| | FLSLFLDERDSGPLILTHIYLLLGMSLPIWLIPRPCTQKGSLGGARAL | |
| | VPYAGVLAVGVGDTVASIFGSTMGEIRWPGTKKTFEGTMTSIFAQII | |
| | SVALILIFDSGVDLNYSYAWILGSISTVSLLEAYTTQIDNLLLPLYLLI | |
| | LLMA | |
| 214 | MSWIKEGELSLWERFCANIIKAGPMPKHIAFIMDGNRRYAKKCQVE | DHDDS |
| | RQEGHSQGFNKLAETLRWCLNLGILEVTVYAFSIENFKRSKSEVDGL | |
| | MDLARQKFSRLMEEKEKLQKHGVCIRVLGDLHLLPLDLQELIAQAV | |
| | QATKNYNKCFLNVCFAYTSRHEISNAVREMAWGVEQGLLDPSDISE | |
| | SLLDKCLYTNRSPHPDILIRTSGEVRLSDFLLWQTSHSCLVFQPVLW | |
| | PEYTFWNLFEAILQFQMNHSVLQKARDMYAEERKRQQLERDQATV | |
| | TEQLLREGLQASGDAQLRRTRLHKLSARREERVQGFLQALELKRAD | |
| | WLARLGTASA | |
| 215 | MWAFSELPMPLLINLIVSLLGFVATVTLIPAFRGHFIAARLCGQDLN | DPAGT1 |
| | KTSRQQIPESQGVISGAVFLIILFCFIPFPFLNCFVKEQCKAFPHHEFV | |
| | ALIGALLAICCMIFLGFADDVLNLRWRHKLLLPTAASLPLLMVYFTN | |
| | FGNTTIVVPKPFRPILGLHLDLGILYYVYMGLLAVFCTNAINILAGIN | |
| | GLEAGQSLVISASIIVFNLVELEGDCRDDHVFSLYFMIPFFFTTLGLL | |
| | YHNWYPSRVFVGDTFCYFAGMTFAVVGILGHFSKTMLLFFMPQVF | |
| | NFLYSLPQLLHIIPCPRHRIPRLNIKTGKLEMSYSKFKTKSLSFLGTFIL | |
| | KVAESLQLVTVHQSETEDGEFTECNNMTLINLLLKVLGPIHERNLTL | |
| | LLLLLQILGSAITFSIRYQLVRLFYDV | |
| 216 | MASLEVSRSPRRSRRELEVRSPRQNKYSVLLPTYNERENLPLIVWLL | DPM1 |
| | VKSFSESGINYEIIIIDDGSPDGTRDVAEQLEKIYGSDRILLRPREKKL | |
| | GLGTAYIHGMKHATGNYIIIMDADLSHHPKFIPEFIRKQKEGNFDIVS | |
| | GTRYKGNGGVYGWDLKRKIISRGANFLTQILLRPGASDLTGSFRLY | |
| | RKEVLEKLIEKCVSKGYVFQMEMIVRARQLNYTIGEVPISFVDRVY | |
| | GESK | |
| | LGGNEIVSFLKGLLTLFATT | |
| 217 | MATGTDQVVGLGLVAVSLIIFTYYTAWVILLPFIDSQHVIHKYFLPR | DPM2 |
| | AYAVAIPLAAGLLLLLFVGLFISYVMLKTKRVTKKAQ | |
| 218 | MTKLAQWLWGLAILGSTWVALTTGALGLELPLSCQEVLWPLPAYL | DPM3 |
| | LVSAGCYALGTVGYRVATFHDCEDAARELQSQIQEARADLARRGL | |
| | RF | |
| 219 | MESTLGAGIVIAEALQNQLAWLENVWLWITFLGDPKILFLFYFPAAY | G6PC3 |
| | YASRRVGIAVLWISLITEWLNLIFKWFLFGDRPFWWVHESGYYSQA | |
| | PAQVHQFPSSCETGPGSPSGHCMITGAALWPIMTALSSQVATRARSR | |
| | WVRVMPSLAYCTFLLAVGLSRIFILAHFPHQVLAGLITGAVLGWLM | |
| | TPRVPMERELSFYGLTALALMLGTSLIYWTLFTLGLDLSWSISLAFK | |
| | WCERPEWIHVDSRPFASLSRDSGAALGLGIALHSPCYAQVRRAQLG | |
| | NGQKIACLVLAMGLLGPLDWLGHPPQISLFYIFNFLKYTLWPCLVL | |
| | ALVPWAVHMFSAQEAPPIHSS | |
| 220 | MCGIFAYLNYHVPRTRREILETLIKGLQRLEYRGYDSAGVGFDGGN | GFPT1 |
| | DKDWEANACKIQLIKKKGKVKALDEEVHKQQDMDLDIEFDVHLGI | |
| | AHTRWATHGEPSPVNSHPQRSDKNNEFIVIHNGIITNYKDLKKFLES | |
| | KGYDFESETDTETIAKLVKYMYDNRESQDTSFTTLVERVIQQLEGAF | |
| | ALVFKSVHFPGQAVGTRRGSPLLIGVRSEHKLSTDHIPILYRTARTQI | |
| | GSKFTRWGSQGERGKDKKGSCNLSRVDSTTCLFPVEEKAVEYYFAS | |
| | DASAVIEHTNRVIFLEDDDVAAVVDGRLSIHRIKRTAGDHPGRAVQ | |
| | TLQMELQQIMKGNFSSFMQKEIFEQPESVVNTMRGRVNFDDYTVNL | |
| | GGLKDHIKEIQRCRRLILIACGTSYHAGVATRQVLEELTELPVMVEL | |
| | ASDFLDRNTPVFRDDVCFFLSQSGETADTLMGLRYCKERGALTVGI | |
| | TNTVGSSISRETDCGVHINAGPEIGVASTKAYTSQFVSLVMFALMM | |
| | CDDRISMQERRKEIMLGLKRLPDLIKEVLSMDDEIQKLATELYHQKS | |
| | VLIMGRGYHYATCLEGALKIKEITYMHSEGILAGELKHGPLALVDK | |
| | LMPVIMIIMRDHTYAKCQNALQQVVARQGRPVVICDKEDTETIKNT | |
| | KRTIKVPHSVDCLQGILSVIPLQLLAFHLAVLRGYDVDFPRNLAKSV | |
| | TVE | |
| 221 | MLKAVILIGGPQKGTRFRPLSFEVPKPLFPVAGVPMIQHHIEACAQV | GMPPA |
| | PGMQEILLIGFYQPDEPLTQFLEAAQQEFNLPVRYLQEFAPLGTGGG | |
| | LYHFRDQILAGSPEAFFVLNADVCSDFPLSAMLEAHRRQRHPFLLLG | |
| | TTANRTQSLNYGCIVENPQTHEVLHYVEKPSTFISDIINCGIYLFSPEA | |
| | LKPLRDVFQRNQQDGQLEDSPGLWPGAGTIRLEQDVFSALAGQGQI | |
| | YVHL | |
| | TDGIWSQIKSAGSALYASRLYLSRYQDTHPERLAKHTPGGPWIRGN | |
| | VYIHPTAKVAPSAVLGPNVSIGKGVTVGEGVRLRESIVLHGATLQEH | |
| | TCVLHSIVGWGSTVGRWARVEGTPSDPNPNDPRARMDSESLFKDG | |
| | KLLPAITILGCRVRIPAEVLILNSIVLPHKELSRSFTNQIIL | |
| 222 | MKALILVGGYGTRLRPLTLSTPKPLVDFCNKPILLHQVEALAAAGV | GMPPB |
| | DHVILAVSYMSQVLEKEMKAQEQRLGIRISMSHEEEPLGTAGPLAL | |
| | ARDLLSETADPFFVLNSDVICDFPFQAMVQFHRHHGQEGSILVTKVE | |
| | EPSKYGVVVCEADTGRIHRFVEKPQVFVSNKINAGMYILSPAVLQRI | |
| | QLQPTSIEKEVFPIMAKEGQLYAMELQGFWMDIGQPKDFLTGMCLF | |
| | LQSLRQKQPERLCSGPGIVGNVLVDPSARIGQNCSIGPNVSLGPGVV | |
| | VEDGVCIRRCTVLRDARIRSHSWLESCIVGWRCRVGQWVRMENVT | |
| | VLGEDVIVNDELYLNGASVLPHKSIGESVPEPRIIM | |
| 223 | MAARWRFWCVSVTMVVALLIVCDVPSASAQRKKEMVLSEKVSQL | MAGT1 |
| | MEWTNKRPVIRMNGDKFRRLVKAPPRNYSVIVMFTALQLHRQCVV | |
| | CKQADEEFQILANSWRYSSAFTNRIFFAMVDFDEGSDVFQMLNMNS | |
| | APTFINFPAKGKPKRGDTYELQVRGFSAEQIARWIADRTDVNIRVIR | |
| | PPNYAGPLMLGLLLAVIGGLVYLRRSNMEFLFNKTGWAFAALCFVL | |
| | AMTSGQMWNHIRGPPYAHKNPHTGHVNYIHGSSQAQFVAETHIVL | |
| | LFNGGVTLGMVLLCEAATSDMDIGKRKIMCVAGIGLVVLFFSWML | |
| | SIFRSKYHGYPYSFLMS | |
| 224 | MAACEGRRSGALGSSQSDFLTPPVGGAPWAVATTVVMYPPPPPPPH | MAN1B1 |
| | RDFISVTLSFGENYDNSKSWRRRSCWRKWKQLSRLQRNMILFLLAF | |
| | LLFCGLLFYINLADHWKALAFRLEEEQKMRPEIAGLKPANPPVLPAP | |
| | QKADTDPENLPEISSQKTQRHIQRGPPHLQIRPPSQDLKDGTQEEAT | |
| | KRQEAPVDPRPEGDPQRTVISWRGAVIEPEQGTELPSRRAEVPTKPP | |
| | LPPARTQGTPVHLNYRQKGVIDVFLHAWKGYRKFAWGHDELKPVS | |
| | RSFSEWFGLGLTLIDALDTMWILGLRKEFEEARKWVSKKLHFEKDV | |
| | DVNLFESTIRILGGLLSAYHLSGDSLFLRKAEDFGNRLMPAFRTPSKI | |
| | PYSDVNIGTGVAHPPRWTSDSTVAEVTSIQLEFRELSRLTGDKKFQE | |
| | AVEKVTQHIHGLSGKKDGLVPMFINTHSGLFTHLGVFTLGARADSY | |
| | YEYLLKQWIQGGKQETQLLEDYVEAIEGVRTHLLRHSEPSKLTFVG | |
| | ELAHGRFSAKMDHLVCFLPGTLALGVYHGLPASHMELAQELMETC | |
| | YQMNRQMETGLSPEIVHFNLYPQPGRRDVEVKPADRHNLLRPETVE | |
| | SLFYLYRVTGDRKYQDWGWEILQSFSRFTRVPSGGYSSINNVQDPQ | |
| | KPEPRDKMESFFLGETLKYLFLLFSDDPNLLSLDAYVFNTEAHPLPI | |
| | WTPA | |
| 225 | MRFRIYKRKVLILTLVVAACGFVLWSSNGRQRKNEALAPPLLDAEP | MGAT2 |
| | ARGAGGRGGDHPSVAVGIRRVSNVSAASLVPAVPQPEADNLTLRY | |
| | RSLVYQLNFDQTLRNVDKAGTWAPRELVLVVQVHNRPEYLRLLLD | |
| | SLRKAQGIDNVLVIFSHDFWSTEINQLIAGVNFCPVLQVFFPFSIQLY | |
| | PNEFPGSDPRDCPRDLPKNAALKLGCINAEYPDSFGHYREAKFSQTK | |
| | HHWWWKLHFVWERVKILRDYAGLILFLEEDHYLAPDFYHVFKKM | |
| | WKLKQQECPECDVLSLGTYSASRSF | |
| | YGMADKVDVKTWKSTEHNMGLALTRNAYQKLIECTDTFCTYDDY | |
| | NWDWTLQYLTVSCLPKFWKVLVPQIPRIFHAGDCGMHHKKTCRPS | |
| | TQSAQIESLLNNNKQYMFPETLTISEKFTVVAISPPRKNGGWGDIRD | |
| | HELCKSYRRLQ | |
| 226 | MARGERRRRAVPAEGVRTAERAARGGPGRRDGRGGGPRSTAGGV | MOGS |
| | ALAVVVLSLALGMSGRWVLAWYRARRAVTLHSAPPVLPADSSSPA | |
| | VAPDLFWGTYRPHVYFGMKTRSPKPLLTGLMWAQQGTTPGTPKLR | |
| | HTCEQGDGVGPYGWEFHDGLSFGRQHIQDGALRLTTEFVKRPGGQ | |
| | HGGDWSWRVTVEPQDSGTSALPLVSLFFYVVTDGKEVLLPEVGAK | |
| | GQLKFISGHTSELGDFRFTLLPPTSPGDTAPKYGSYNVFWTSNPGLP | |
| | LLTEMVKSRLNSWFQHRPPGAPPERYLGLPGSLKWEDRGPSGQGQ | |
| | GQFLIQQVTLKIPISIEFVFESGSAQAGGNQALPRLAGSLLTQALESH | |
| | AEGFRERFEKTFQLKEKGLSSGEQVLGQAALSGLLGGIGYFYGQGL | |
| | VLPDIGVEGSEQKVDPALFPPVPLFTAVPSRSFFPRGFLWDEGFHQL | |
| | VVQRWDPSLTREALGHWLGLLNADGWIGREQILGDEARARVPPEF | |
| | LVQRAVHANPPTLLLPVAHMLEVGDPDDLAFLRKALPRLHAWFSW | |
| | LHQSQAGPLPLSYRWRGRDPALPTLLNPKTLPSGLDDYPRASHPSVT | |
| | ERHLDLRCWVALGARVLTRLAEHLGEAEVAAELGPLAASLEAAES | |
| | LDELHWAPELGVFADFGNHTKAVQLKPRPPQGLVRVVGRPQPQLQ | |
| | YVDALGYVSLFPLLLRLLDPTSSRLGPLLDILADSRHLWSPFGLRSL | |
| | AASSSFYGQRNSEHDPPYWRGAVWLNVNYLALGALHHYGHLEGP | |
| | HQARAAKLHGELRANVVGNVWRQYQATGFLWEQYSDRDGRGMG | |
| | CRPFHGWTSLVLLAMAEDY | |
| 227 | MAAEADGPLKRLLVPILLPEKCYDQLFVQWDLLHVPCLKILLSKGL | MPDU1 |
| | GLGIVAGSLLVKLPQVFKILGAKSAEGLSLQSVMLELVALTGTMVY | |
| | SITNNFPFSSWGEALFLMLQTITICFLVMHYRGQTVKGVAFLACYGL | |
| | VLLVLLSPLTPLTVVTLLQASNVPAVVVGRLLQAATNYHNGHTGQL | |
| | SAITVFLLFGGSLARIFTSIQETGDPLMAGTFVVSSLCNGLIAAQLLF | |
| | YWNAKPPHKQKKAQ | |
| 228 | MAAPRVFPLSCAVQQYAWGKMGSNSEVARLLASSDPLAQIAEDKP | MPI |
| | YAELWMGTHPRGDAKILDNRISQKTLSQWIAENQDSLGSKVKDTFN | |
| | GNLPFLFKVLSVETPLSIQAHPNKELAEKLHLQAPQHYPDANHKPE | |
| | MAIALTPFQGLCGFRPVEEIVTFLKKVPEFQFLIGDEAATHLKQTMS | |
| | HDSQAVASSLQSCFSHLMKSEKKVVVEQLNLLVKRISQQAAAGNN | |
| | MEDIFGELLLQLHQQYPGDIGCFAIYFLNLLTLKPGEAMFLEANVPH | |
| | AYLKGDCVECMACSDNTVRAGLTP | |
| | KFIDVPTLCEMLSYTPSSSKDRLFLPTRSQEDPYLSIYDPPVPDFTIMK | |
| | TEVPGSVTEYKVLALDSASILLMVQGTVIASTPTTQTPIPLQRGGVLF | |
| | IGANESVSLKLTEPKDLLIFRACCLL | |
| 229 | MAAAALGSSSGSASPAVAELCQNTPETFLEASKLLLTYADNILRNPN | NGLY1 |
| | DEKYRSIRIGNTAFSTRLLPVRGAVECLFEMGFEEGETHLIFPKKASV | |
| | EQLQKIRDLIAIERSSRLDGSNKSHKVKSSQQPAASTQLPTTPSSNPS | |
| | GLNQHTRNRQGQSSDPPSASTVAADSAILEVLQSNIQHVLVYENPAL | |
| | QEKALACIPVQELKRKSQEKLSRARKLDKGINISDEDFLLLELLHWF | |
| | KEE | |
| | FFHWVNNVLCSKCGGQTRSRDRSLLPSDDELKWGAKEVEDHYCDA | |
| | CQFSNRFPRYNNPEKLLETRCGRCGEWANCFTLCCRAVGFEARYV | |
| | WDYTDHVWTEVYSPSQQRWLHCDACEDVCDKPLLYEIGWGKKLS | |
| | YVIAFSKDEVVDVTWRYSCKHEEVIARRTKVKEALLRDTINGLNKQ | |
| | RQLFLSENRRKELLQRIIVELVEFISPKTPKPGELGGRISGSVAWRVA | |
| | RGEMGLQRKETLFIPCENEKISKQLHLCYNIVKDRYVRVSNNNQTIS | |
| | GWENGVWKMESIFRKVETDWHMVYLARKEGSSFAYISWKFECGS | |
| | VGLKVDSISIRTSSQTFQTGTVEWKLRSDTAQVELTGDNSLHSYADF | |
| | SGATEVILEAELSRGDGDVAWQHTQLFRQSLNDHEENCLEIIIKFSDL | |
| 230 | MVKIVTVKTQAYQDQKPGTSGLRKRVKVFQSSANYAENFIQSIISTV | PGM1 |
| | EPAQRQEATLVVGGDGRFYMKEAIQLIARIAAANGIGRLVIGQNGIL | |
| | STPAVSCIIRKIKAIGGIILTASHNPGGPNGDFGIKFNISNGGPAPEAIT | |
| | DKIFQISKTIEEYAVCPDLKVDLGVLGKQQFDLENKFKPFTVEIVDS | |
| | VEAYATMLRSIFDFSALKELLSGPNRLKIRIDAMHGVVGPYVKKILC | |
| | EELGAPANSAVNCVPLEDFGGHHPDPNLTYAADLVETMKSGEHDF | |
| | GAAFDGDGDRNMILGKHGFFVNPSDSVAVIAANIFSIPYFQQTGVRG | |
| | FARSMPTSGALDRVASATKIALYETPTGWKFFGNLMDASKLSLCGE | |
| | ESFGTGSDHIREKDGLWAVLAWLSILATRKQSVEDILKDHWQKYGR | |
| | NFFTRYDYEEVEAEGANKMMKDLEALMFDRSFVGKQFSANDKVY | |
| | TVEKADNFEYSDPVDGSISRNQGLRLIFTDGSRIVFRLSGTGSAGATI | |
| | RLYIDSYEKDVAKINQDPQVMLAPLISIALKVSQLQERTGRTAPTVIT | |
| 231 | MDLGAITKYSALHAKPNGLILQYGTAGFRTKAEHLDHVMFRMGLL | PGM3 |
| | AVLRSKQTKSTIGVMVTASHNPEEDNGVKLVDPLGEMLAPSWEEH | |
| | ATCLANAEEQDMQRVLIDISEKEAVNLQQDAFVVIGRDTRPSSEKLS | |
| | QSVIDGVTVLGGQFHDYGLLTTPQLHYMVYCRNTGGRYGKATIEG | |
| | YYQKLSKAFVELTKQASCSGDEYRSLKVDCANGIGALKLREMEHY | |
| | FSQGLSVQLFNDGSKGKLNHLCGADFVKSHQKPPQGMEIKSNERCC | |
| | SFDGDADRIVYYYHDADGHFHLIDGDKIATLISSFLKELLVEIGESLN | |
| | IGVVQTAYANGSSTRYLEEVMKVPVYCTKTGVKHLHHKAQEFDIG | |
| | VYFEANGHGTALFSTAVEMKIKQSAEQLEDKKRKAAKMLENIIDLF | |
| | NQAAGDAISDMLVIEAILALKGLTVQQWDALYTDLPNRQLKVQVA | |
| | DRRVISTTDAERQAVTPPGLQEAINDLVKKYKLSRAFVRPSGTEDV | |
| | VRVYAEADSQESADHLAHEVSLAVFQLAGGIGERPQPGF | |
| 232 | MGSQEVLGHAARLASSGLLLQVLFRLITFVLNAFILRFLSKEIVGVV | RFT1 |
| | NVRLTLLYSTTLFLAREAFRRACLSGGTQRDWSQTLNLLWLTVPLG | |
| | VFWSLFLGWIWLQLLEVPDPNVVPHYATGVVLFGLSAVVELLGEPF | |
| | WVLAQAHMFVKLKVIAESLSVILKSVLTAFLVLWLPHWGLYIFSLA | |
| | QLFYTTVLVLCYVIYFTKLLGSPESTKLQTLPVSRITDLLPNITRNGA | |
| | FINWKEAKLTWSFFKQSFLKQILTEGERYVMTFLNVLNFGDQGVYD | |
| | IVNNLGSLVARLIFQPIEESFYIFFAKVLERGKDATLQKQEDVAVAA | |
| | AVLESLLKLALLAGLTITVFGFAYSQLALDIYGGTMLSSGSGPVLLR | |
| | SYCLYVLLLAINGVTECFTFAAMSKEEVDRYNFVMLALSSSFLVLS | |
| | YLLTRWCGSVGFILANCFNMGIRITQSLCFIHRYYRRSPHRPLAGLH | |
| | LSPVLLGTFALSGGVTAVSEVFLCCEQGWPARLAHIAVGAFCLGAT | |
| | LGTAFLTETKLIHFLRTQLGVPRRTDKMT | |
| 233 | MATYLEFIQQNEERDGVRFSWNVWPSSRLEATRMVVPLACLLTPLK | SEC23B |
| | ERPDLPPVQYEPVLCSRPTCKAVLNPLCQVDYRAKLWACNFCFQRN | |
| | QFPPAYGGISEVNQPAELMPQFSTIEYVIQRGAQSPLIFLYVVDTCLE | |
| | EDDLQALKESLQMSLSLLPPDALVGLITFGRMVQVHELSCEGISKSY | |
| | VFRGTKDLTAKQIQDMLGLTKPAMPMQQARPAQPQEHPFASSRFL | |
| | QPVHKIDMNLTDLLGELQRDPWPVTQGKRPLRSTGVALSIAVGLLE | |
| | GTFPNTGARIMLFTGGPPTQGPGMVVGDELKIPIRSWHDIEKDNARF | |
| | MKKATKHYEMLANRTAANGHCIDIYACALDQTGLLEMKCCANLT | |
| | GGYMVMGDSFNTSLFKQTFQRIFTKDFNGDFRMAFGATLDVKTSR | |
| | ELKIAGAIGPCVSLNVKGPCVSENELGVGGTSQWKICGLDPTSTLGI | |
| | YFEVVNQHNTPIPQGGRGAIQFVTHYQHSSTQRRIRVTTIARNWAD | |
| | VQSQLRHIEAAFDQEAAAVLMARLGVFRAESEEGPDVLRWLDRQLI | |
| | RLCQKFGQYNKEDPTSFRLSDSFSLYPQFMFHLRRSPFLQVFNNSPD | |
| | ESSYYRHHFARQDLTQSLIMIQPILYSYSFHGPPEPVLLDSSSILADRI | |
| | LLMDTFFQIVIYLGETIAQWRKAGYQDMPEYENFKHLLQAPLDDAQ | |
| | EILQARFPMPRYINTEHGGSQARFLLSKVNPSQTHNNLYAWGQETG | |
| | APILTDDVSLQVFMDHLKKLAVSSAC | |
| 234 | MAAPRDNVTLLFKLYCLAVMTLMAAVYTIALRYTRTSDKELYFST | SLC35A1 |
| | TAVCITEVIKLLLSVGILAKETGSLGRFKASLRENVLGSPKELLKLSV | |
| | PSLVYAVQNNMAFLALSNLDAAVYQVTYQLKIPCTALCTVLMLNR | |
| | TLSKLQWVSVFMLCAGVTLVQWKPAQATKVVVEQNPLLGFGAIAI | |
| | AVLCSGFAGVYFEKVLKSSDTSLWVRNIQMYLSGIIVTLAGVYLSD | |
| | GAEIKEKGFFYGYTYYVWFVIFLASVGGLYTSVVVKYTDNIMKGFS | |
| | AAAAIVLSTIASVMLFGLQITLTFALGTLLVCVSIYLYGLPRQDTTSI | |
| | QQGETASKERVIGV | |
| 235 | MAAVGAGGSTAAPGPGAVSAGALEPGTASAAHRRLKYISLAVLVV | SLC35A2 |
| | QNASLILSIRYARTLPGDRFFATTAVVMAEVLKGLTCLLLLFAQKRG | |
| | NVKHLVLFLHEAVLVQYVDTLKLAVPSLIYTLQNNLQYVAISNLPA | |
| | ATFQVTYQLKILTTALFSVLMLNRSLSRLQWASLLLLFTGVAIVQAQ | |
| | QAGGGGPRPLDQNPGAGLAAVVASCLSSGFAGVYFEKILKGSSGSV | |
| | WLRNLQLGLFGTALGLVGLWWAEGTAVATRGFFFGYTPAVWGVV | |
| | LNQAFGGLLVAVVVKYADNILKGFATSLSIVLSTVASIRLFGFHVDP | |
| | LFALGAGLVIGAVYLYSLPRGAAKAIASASASASGPCVHQQPPGQPP | |
| | PPQLSSHRGDLITEPFLPKLLTKVKGS | |
| 236 | MNRAPLKRSRILHMALTGASDPSAEAEANGEKPFLLRALQIALVVS | SLC35C1 |
| | LYWVTSISMVFLNKYLLDSPSLRLDTPIFVTFYQCLVTTLLCKGLSA | |
| | LAACCPGAVDFPSLRLDLRVARSVLPLSVVFIGMITFNNLCLKYVGV | |
| | AFYNVGRSLTTVFNVLLSYLLLKQTTSFYALLTCGIIIGGFWLGVDQ | |
| | EGAEGTLSWLGTVFGVLASLCVSLNAIYTTKVLPAVDGSIWRLTFY | |
| | NNVNACILFLPLLLLLGELQALRDFAQLGSAHFWGMMTLGGLFGFA | |
| | IGYVTGLQIKFTSPLTHNVSG | |
| | TAKACAQTVLAVLYYEETKSFLWWTSNMMVLGGSSAYTWVRGW | |
| | EMKKTPEEPSPKDSEKSAMGV | |
| 237 | MAAMASLGALALLLLSSLSRCSAEACLEPQITPSYYTTSDAVISTET | SSR4 |
| | VFIVEISLTCKNRVQNMALYADVGGKQFPVTRGQDVGRYQVSWSL | |
| | DHKSAHAGTYEVRFFDEESYSLLRKAQRNNEDISIIPPLFTVSVDHR | |
| | GTWNGPWVSTEVLAAAIGLVIYYLAFSAKSHIQA | |
| 238 | MAPWAEAEHSALNPLRAVWLTLTAAFLLTLLLQLLPPGLLPGCAIF | SRD5A3 |
| | QDLIRYGKTKCGEPSRPAACRAFDVPKRYFSHFYIISVLWNGFLLWC | |
| | LTQSLFLGAPFPSWLHGLLRILGAAQFQGGELALSAFLVLVFLWLHS | |
| | LRRLFECLYVSVFSNVMIHVVQYCFGLVYYVLVGLTVLSQVPMDG | |
| | RNAYITGKNLLMQARWFHILGMMMFIWSSAHQYKCHVILGNLRKN | |
| | KAGVVIHCNHRIPFGDWFEYVSSPNYLAELMIYVSMAVTFGFHNLT | |
| | WWLVVTNVFFNQALSAFLSHQFYKSKFVSYPKHRKAFLPFLF | |
| 239 | MAAAAPGNGRASAPRLLLLFLVPLLWAPAAVRAGPDEDLSHRNKE | TMEM165 |
| | PPAPAQQLQPQPVAVQGPEPARVEKIFTPAAPVHTNKEDPATQTNL | |
| | GFIHAFVAAISVIIVSELGDKTFFIAAIMAMRYNRLTVLAGAMLALG | |
| | LMTCLSVLFGYATTVIPRVYTYYVSTVLFAIFGIRMLREGLKMSPDE | |
| | GQEELEEVQAELKKKDEEFQRTKLLNGPGDVETGTSITVPQKKWLH | |
| | FISPIFVQALTLTFLAEWGDRSQLTTIVLAAREDPYGVAVGGTVGHC | |
| | LCTGLAVIGGRMIAQKISVRTVTIIGGIVFLAFAFSALFISPDSGF | |
| 240 | MSSWLGGLGSGLGQSLGQVGGSLASLTGQISNFTKDMLMEGTEEV | TRIP11 |
| | EAELPDSRTKEIEAIHAILRSENERLKKLCTDLEEKHEASEIQIKQQST | |
| | SYRNQLQQKEVEISHLKARQIALQDQLLKLQSAAQSVPSGAGVPAT | |
| | TASSSFAYGISHHPSAFHDDDMDFGDIISSQQEINRLSNEVSRLESEV | |
| | GHWRHIAQTSKAQGTDNSDQSEICKLQNIIKELKQNRSQEIDDHQHE | |
| | MSVLQNAHQQKLTEISRRHREELSDYEERIEELENLLQQGGSGVIET | |
| | DLSKIYEMQKTIQVLQIEKVESTKKMEQLEDKIKDINKKLSSAENDR | |
| | DILRREQEQLNVEKRQIMEECENLKLECSKLQPSAVKQSDTMTEKE | |
| | RILAQSASVEEVFRLQQALSDAENEIMRLSSLNQDNSLAEDNLKLK | |
| | MRIEVLEKEKSLLSQEKEELQMSLLKLNNEYEVIKSTATRDISLDSEL | |
| | HDLRLNLEAKEQELNQSISEKETLIAEIEELDRQNQEATKHMILIKDQ | |
| | LSKQQNEGDSIISKLKQDLNDEKKRVHQLEDDKMDITKELDVQKEK | |
| | LIQSEVALNDLHLTKQKLEDKVENLVDQLNKSQESNVSIQKENLEL | |
| | KEHIRQNEEELSRIRNELMQSLNQDSNSNFKDTLLKEREAEVRNLKQ | |
| | NLSELEQLNENLKKVAFDVKMENEKLVLACEDVRHQLEECLAGNN | |
| | QLSLEKNTIVETLKMEKGEIEAELCWAKKRLLEEANKYEKTIEELSN | |
| | ARNLNTSALQLEHEHLIKLNQKKDMEIAELKKNIEQMDTDHKETKD | |
| | VLSSSLEEQKQLTQLINKKEIFIEKLKERSSKLQEELDKYSQALRKNE | |
| | ILRQTIEEKDRSLGSMKEENNHLQEELERLREEQSRTAPVADPKTLD | |
| | SVTELASEVSQLNTIKEHLEEEIKHHQKIIEDQNQSKMQLLQSLQEQ | |
| | KKEMDEFRYQHEQMNATHTQLFLEKDEEIKSLQKTIEQIKTQLHEER | |
| | QDIQTDNSDIFQETKVQSLNIENGSEKHDLSKAETERLVKGIKERELE | |
| | IKLLNEKNISLTKQIDQLSKDEVGKLTQIIQQKDLEIQALHARISSTSH | |
| | TQDVVYLQQQLQAYAMEREKVFAVLNEKTRENSHLKTEYHKMMD | |
| | IVAAKEAALIKLQDENKKLSTRFESSGQDMFRETIQNLSRIIREKDIEI | |
| | DALSQKCQTLLAVLQTSSTGNEAGGVNSNQFEELLQERDKLKQQV | |
| | KKMEEWKQQVMTTVQNMQHESAQLQEELHQLQAQVLVDSDNNS | |
| | KLQVDYTGLIQSYEQNETKLKNFGQELAQVQHSIGQLCNTKDLLLG | |
| | KLDIISPQLSSASLLTPQSAECLRASKSEVLSESSELLQQELEELRKSL | |
| | QEKDATIRTLQENNHRLSDSIAATSELERKEHEQTDSEIKQLKEKQD | |
| | VLQKLLKEKDLLIKAKSDQLLSSNENFTNKVNENELLRQAVTNLKE | |
| | RILILEMDIGKLKGENEKIVETYRGKETEYQALQETNMKFSMMLRE | |
| | KEFECHSMKEKALAFEQLLKEKEQGKTGELNQLLNAVKSMQEKTV | |
| | VFQQERDQVMLALKQKQMENTALQNEVQRLRDKEFRSNQELERLR | |
| | NHLLESEDSYTREALAAEDREAKLRKKVTVLEEKLVSSSNAMENAS | |
| | HQASVQVESLQEQLNVVSKQRDETALQLSVSQEQVKQYALSLANL | |
| | QMVLEHFQQEEKAMYSAELEKQKQLIAEWKKNAENLEGKVISLQE | |
| | CLDEANAALDSASRLTEQLDVKEEQIEELKRQNELRQEMLDDVQK | |
| | KLMSLANSSEGKVDKVLMRNLFIGHFHTPKNQRHEVLRLMGSILGV | |
| | RREEMEQLFHDDQGGVTRWMTGWLGGGSKSVPNTPLRPNQQSVV | |
| | NSSFSELFVKFLETESHPSIPPPKLSVHDMKPLDSPGRRKRDTNAPES | |
| | FKDTAESRSGRRTDVNPFLAPRSAAVPLINPAGLGPGGPGHLLLKPIS | |
| | DVLPTFTPLPALPDNSAGVVLKDLLKQ | |
| 241 | MGARGAPSRRRQAGRRLRYLPTGSFPFLLLLLLLCIQLGGGQKKKE | TUSC3 |
| | NLLAEKVEQLMEWSSRRSIFRMNGDKFRKFIKAPPRNYSMIVMFTA | |
| | LQPQRQCSVCRQANEEYQILANSWRYSSAFCNKLFFSMVDYDEGT | |
| | DVFQQLNMNSAPTFMHFPPKGRPKRADTFDLQRIGFAAEQLAKWIA | |
| | DRTDVHIRVFRPPNYSGTIALALLVSLVGGLLYLRRNNLEFIYNKTG | |
| | WAMVSLCIVFAMTSGQMWNHIRGPPYAHKNPHNGQVSYIHGSSQA | |
| | QFVAESHIILVLNAAITMGMVLLNE | |
| | AATSKGDVGKRRIICLVGLGLVVFFFSFLLSIFRSKYHGYPYSDLDFE | |
| 242 | MVCVLVLAAAAGAVAVFLILRIWVVLRSMDVTPRESLSILVVAGSG | ALG14 |
| | GHTTEILRLLGSLSNAYSPRHYVIADTDEMSANKINSFELDRADRDP | |
| | SNMYTKYYIHRIPRSREVQQSWPSTVFTTLHSMWLSFPLIHRVKPDL | |
| | VLCNGPGTCVPICVSALLLGILGIKKVIIVYVESICRVETLSMSGKILF | |
| | HLSDYFIVQWPALKEKYPKSVYLGRIV | |
| 243 | MRLREPLLSGSAAMPGASLQRACRLLVAVCALHLGVTLVYYLAGR | B4GALT1 |
| | DLSRLPQLVGVSTPLQGGSNSAAAIGQSSGELRTGGARPPPPLGASS | |
| | QPRPGGDSSPVVDSGPGPASNLTSVPVPHTTALSLPACPEESPLLVGP | |
| | MLIEFNMPVDLELVAKQNPNVKMGGRYAPRDCVSPHKVAIIIPFRN | |
| | RQEHLKYWLYYLHPVLQRQQLDYGIYVINQAGDTIFNRAKLLNVGF | |
| | QEALKDYDYTCFVFSDVDLIPMNDHNAYRCFSQPRHISVAMDKFGF | |
| | SLPYVQYFGGVSALSKQQFLTINGFPNNYWGWGGEDDDIFNRLVFR | |
| | GMSISRPNAVVGRCRMIRHSRDKKNEPNPQRFDRIAHTKETMLSDG | |
| | LNSLTYQVLDVQRYPLYTQITVDIGTPS | |
| 244 | MGYFRCARAGSFGRRRKMEPSTAARAWALFWLLLPLLGAVCASGP | DDOST |
| | RTLVLLDNLNVRETHSLFFRSLKDRGFELTFKTADDPSLSLIKYGEFL | |
| | YDNLIIFSPSVEDFGGNINVETISAFIDGGGSVLVAASSDIGDPLRELG | |
| | SECGIEFDEEKTAVIDHHNYDISDLGQHTLIVADTENLLKAPTIVGKS | |
| | SLNPILFRGVGMVADPDNPLVLDILTGSSTSYSFFPDKPITQYPHAVG | |
| | KNTLLIAGLQARNNARVIFSGSLDFFSDSFFNSAVQKAAPGSQRYSQ | |
| | TGNYELAVALSRWVFKEEGVLRVGPVSHHRVGETAPPNAYTVTDL | |
| | VEYSIVIQQLSNGKWVPFDGDDIQLEFVRIDPFVRTFLKKKGGKYSV | |
| | QFKLPDVYGVFQFKVDYNRLGYTHLYSSTQVSVRPLQHTQYERFIP | |
| | SAYPYYASAFSMMLGLFIFSIVFLHMKEKEKSD | |
| 245 | MTGLYELVWRVLHALLCLHRTLTSWLRVRFGTWNWIWRRCCRAA | NUS1 |
| | SAAVLAPLGFTLRKPPAVGRNRRHHRHPRGGSCLAAAHHRMRWR | |
| | ADGRSLEKLPVHMGLVITEVEQEPSFSDIASLVVWCMAVGISYISVY | |
| | DHQGIFKRNNSRLMDEILKQQQELLGLDCSKYSPEFANSNDKDDQV | |
| | LNCHLAVKVLSPEDGKADIVRAAQDFCQLVAQKQKRPTDLDVDTL | |
| | ASLLSSNGCPDPDLVLKFGPVDSTLGFLPWHIRLTEIVSLPSHLNISYE | |
| | DFFSALRQYAACEQRLGK | |
| 246 | MAPPGSSTVFLLALTIIASTWALTPTHYLTKHDVERLKASLDRPFTN | RPN2 |
| | LESAFYSIVGLSSLGAQVPDAKKACTYIRSNLDPSNVDSLFYAAQAS | |
| | QALSGCEISISNETKDLLLAAVSEDSSVTQIYHAVAALSGFGLPLASQ | |
| | EALSALTARLSKEETVLATVQALQTASHLSQQADLRSIVEEIEDLVA | |
| | RLDELGGVYLQFEEGLETTALFVAATYKLMDHVGTEPSIKEDQVIQ | |
| | LMNAIFSKKNFESLSEAFSVASAAAVLSHNRYHVPVVVVPEGSASD | |
| | THEQAILRLQVTNVLSQPLTQATVKLEHAKSVASRATVLQKTSFTP | |
| | VGDVFELNFMNVKFSSGYYDFLVEVEGDNRYIANTVELRVKISTEV | |
| | GITNVDLSTVDKDQSIAPKTTRVTYPAKAKGTFIADSHQNFALFFQL | |
| | VDVNTGAELTPHQTFVRLHNQKTGQEVVFVAEPDNKNVYKFELDT | |
| | SERKIEFDSASGTYTLYLIIGDATLKNPILWNVADVVIKFPEEEAPST | |
| | VLSQNLFTPKQEIQHLFREPEKRPPTV | |
| | VSNTFTALILSPLLLLFALWIRIGANVSNFTFAPSTIIFHLGHAAMLGL | |
| | MYVYWTQLNMFQTLKYLAILGSVTFLAGNRMLAQQAVKRTAH | |
| 247 | MTTYLEFIQQNEERDGVRFSWNVWPSSRLEATRMVVPVAALFTPLK | SEC23A |
| | ERPDLPPIQYEPVLCSRTTCRAVLNPLCQVDYRAKLWACNFCYQRN | |
| | QFPPSYAGISELNQPAELLPQFSSIEYVVLRGPQMPLIFLYVVDTCME | |
| | DEDLQALKESMQMSLSLLPPTALVGLITFGRMVQVHELGCEGISKS | |
| | YVFRGTKDLSAKQLQEMLGLSKVPLTQATRGPQVQQPPPSNRFLQP | |
| | VQKIDMNLTDLLGELQRDPWPVPQGKRPLRSSGVALSIAVGLLECT | |
| | FPNTGARIMMFIGGPATQGPGM | |
| | VVGDELKTPIRSWHDIDKDNAKYVKKGTKHFEALANRAATTGHVI | |
| | DIYACALDQTGLLEMKCCPNLTGGYMVMGDSFNTSLFKQTFQRVF | |
| | TKDMHGQFKMGFGGTLEIKTSREIKISGAIGPCVSLNSKGPCVSENEI | |
| | GTGGTCQWKICGLSPTTTLAIYFEVVNQHNAPIPQGGRGAIQFVTQY | |
| | QHSSGQRRIRVTTIARNWADAQTQIQNIAASFDQEAAAILMARLAIY | |
| | RAETEEGPDVLRWLDRQLIRLCQKFGEYHKDDPSSFRFSETFSLYPQ | |
| | FMFHLRRSSFLQVFNNSPDESSYYRHHFMRQDLTQSLIMIQPILYAY | |
| | SFSGPPEPVLLDSSSILADRILLMDTFFQILIYHGETIAQWRKSGYQD | |
| | MPEYENFRHLLQAPVDDAQEILHSRFPMPRYIDTEHGGSQARFLLSK | |
| | VNPSQTHNNMYAWGQESGAPILTDDVSLQVFMDHLKKLAVSSAA | |
| 248 | MFANLKYVSLGILVFQTTSLVLTMRYSRTLKEEGPRYLSSTAVVVA | SLC35A3 |
| | ELLKIMACILLVYKDSKCSLRALNRVLHDEILNKPMETLKLAIPSGIY | |
| | TLQNNLLYVALSNLDAATYQVTYQLKILTTALFSVSMLSKKLGVYQ | |
| | WLSLVILMTGVAFVQWPSDSQLDSKELSAGSQFVGLMAVLTACFSS | |
| | GFAGVYFEKILKETKQSVWIRNIQLGFFGSIFGLMGVYIYDGELVSK | |
| | NGFFQGYNRLTWIVVVLQALGGLVIAAVIKYADNILKGFATSLSIILS | |
| | TLISYFWLQDFVPTSVFFLGAILVITATFLYGYDPKPAGNPTKA | |
| 249 | MGLLVFVRNLLLALCLFLVLGFLYYSAWKLHLLQWEEDSNSVVLS | ST3GAL3 |
| | FDSAGQTLGSEYDRLGFLLNLDSKLPAELATKYANFSEGACKPGYA | |
| | SALMTAIFPRFSKPAPMFLDDSFRKWARIREFVPPFGIKGQDNLIKAI | |
| | LSVTKEYRLTPALDSLRCRRCIIVGNGGVLANKSLGSRIDDYDIVVR | |
| | LNSAPVKGFEKDVGSKTTLRITYPEGAMQRPEQYERDSLFVLAGFK | |
| | WQDFKWLKYIVYKERVSASDGFWKSVATRVPKEPPEIRILNPYFIQE | |
| | AAFTLIGLPFNNGLMGRGNIPTLGSVAVTMALHGCDEVAVAGFGY | |
| | DMSTPNAPLHYYETVRMAAIKESWTHNIQREKEFLRKLVKARVITD | |
| | LSSGI | |
| 250 | MTKFGFLRLSYEKQDTLLKLLILSMAAVLSFSTRLFAVLRFESVIHEF | STT3A |
| | DPYFNYRTTRFLAEEGFYKFHNWFDDRAWYPLGRIIGGTIYPGLMIT | |
| | SAAIYHVLHFFHITIDIRNVCVFLAPLFSSFTTIVTYHLTKELKDAGA | |
| | GLLAAAMIAVVPGYISRSVAGSYDNEGIAIFCMLLTYYMWIKAVKT | |
| | GSICWAAKCALAYFYMVSSWGGYVFLINLIPLHVLVLMLTGRFSHR | |
| | IYVAYCTVYCLGTILSMQISFVGFQPVLSSEHMAAFGVFGLCQIHAF | |
| | VDYLRSKLNPQQFEVLFRSVISLVGFVLLTVGALLMLTGKISPWTGR | |
| | FYSLLDPSYAKNNIPIIASVSEHQPTTWSSYYFDLQLLVFMFPVGLYY | |
| | CFSNLSDARIFIIMYGVTSMYFSAVMVRLMLVLAPVMCILSGIGVSQ | |
| | VLSTYMKNLDISRPDKKSKKQQDSTYPIKNEVASGMILVMAFFLITY | |
| | TFHSTWVTSEAYSSPSIVLSARGGDGSRIIFDDFREAYYWLRHNTPE | |
| | DAKVMSWWDYGYQITAMANRTILVDNNTWNNTHISRVGQAMAST | |
| | EEKAYEIMRELDVSYVLVIFGGLTGYSSDDINKFLWMVRIGGSTDT | |
| | GKHIKENDYYTPTGEFRVDREGSPVLLNCLMYKMCYYRFGQVYTE | |
| | AKRPPGFDRVRNAEIGNKDFELDVLEEAYTTEHWLVRIYKVKDLDN | |
| | RGLSRT | |
| 251 | MAEPSAPESKHKSSLNSSPWSGLMALGNSRHGHHGPGAQCAHKAA | STT3B |
| | GGAAPPKPAPAGLSGGLSQPAGWQSLLSFTILFLAWLAGFSSRLFAV | |
| | IRFESIIHEFDPWFNYRSTHHLASHGFYEFLNWFDERAWYPLGRIVG | |
| | GTVYPGLMITAGLIHWILNTLNITVHIRDVCVFLAPTFSGLTSISTFLL | |
| | TRELWNQGAGLLAACFIAIVPGYISRSVAGSFDNEGIAIFALQFTYYL | |
| | WVKSVKTGSVFWTMCCCLSYFYMVSAWGGYVFIINLIPLHVFVLLL | |
| | MQRYSKRVYIAYSTFYIVGLILSMQIPFVGFQPIRTSEHMAAAGVFA | |
| | LLQAYAFLQYLRDRLTKQEFQTLFFLGVSLAAGAVFLSVIYLTYTG | |
| | YIAPWSGRFYSLWDTGYAKIHIPIIASVSEHQPTTWVSFFFDLHILVC | |
| | TFPAGLWFCIKNINDERVFVALYAISAVYFAGVMVRLMLTLTPVVC | |
| | MLSAIAFSNVFEHYLGDDMKRENPPVEDSSDEDDKRNQGNLYDKA | |
| | GKVRKHATEQEKTEEGLGPNIKSIVTMLMLMLLMMFAVHCTWVTS | |
| | NAYSSPSVVLASYNHDGTRNILDDFREAYFWLRQNTDEHARVMSW | |
| | WDYGYQIAGMANRTTLVDNNTWNNSHIALVGKAMSSNETAAYKI | |
| | MRTLDVDYVLVIFGGVIGYSGDDINKFLWMVRIAEGEHPKDIRESD | |
| | YFTPQGEFRVDKAGSPTLLNCLMYKMSYYRFGEMQLDFRTPPGFD | |
| | RTRNAEIGNKDIKFKHLEEAFTSEHWLVRIYKVKAPDNRETLDHKP | |
| | RVTNIFPKQKYLSKKTTKRKRGYIKNKLVFKKGKKISKKTV | |
| 252 | MARKSNLPVLLVPFLLCQALVRCSSPLPLVVNTWPFKNATEAAWR | AGA |
| | ALASGGSALDAVESGCAMCEREQCDGSVGFGGSPDELGETTLDAMI | |
| | MDGTTMDVGAVGDLRRIKNAIGVARKVLEHTTHTLLVGESATTFA | |
| | QSMGFINEDLSTTASQALHSDWLARNCQPNYWRNVIPDPSKYCGPY | |
| | KPPGILKQDIPIHKETEDDRGHDTIGMVVIHKTGHIAAGTSTNGIKFK | |
| | IHGRVGDSPIPGAGAYADDTAGAAAATGNGDILMRFLPSYQAVEY | |
| | MRRGEDPTIACQKVISRIQKHFPEF | |
| | FGAVICANVTGSYGAACNKLSTFTQFSFMVYNSEKNQPTEEKVDCI | |
| 253 | MGAPRSLLLALAAGLAVARPPNIVLIFADDLGYGDLGCYGHPSSTTP | ARSA |
| | NLDQLAAGGLRFTDFYVPVSLCTPSRAALLTGRLPVRMGMYPGVL | |
| | VPSSRGGLPLEEVTVAEVLAARGYLTGMAGKWHLGVGPEGAFLPP | |
| | HQGFHRFLGIPYSHDQGPCQNLTCFPPATPCDGGCDQGLVPIPLLAN | |
| | LSVEAQPPWLPGLEARYMAFAHDLMADAQRQDRPFFLYYASHHTH | |
| | YPQFSGQSFAERSGRGPFGDSLMELDAAVGTLMTAIGDLGLLEETL | |
| | VIFTADNGPETMRMSRGGCSGLLRC | |
| | GKGTTYEGGVREPALAFWPGHIAPGVTHELASSLDLLPTLAALAGA | |
| | PLPNVTLDGFDLSPLLLGTGKSPRQSLFFYPSYPDEVRGVFAVRTGK | |
| | YKAHFFTQGSAHSDTTADPACHASSSLTAHEPPLLYDLSKDPGENY | |
| | NLLGGVAGATPEVLQALKQLQLLKAQLDAAVTFGPSQVARGEDPA | |
| | LQICCHPGCTPRPACCHCPDPHA | |
| 254 | MGPRGAASLPRGPGPRRLLLPVVLPLLLLLLLAPPGSGAGASRPPHL | ARSB |
| | VFLLADDLGWNDVGFHGSRIRTPHLDALAAGGVLLDNYYTQPLCT | |
| | PSRSQLLTGRYQIRTGLQHQIIWPCQPSCVPLDEKLLPQLLKEAGYTT | |
| | HMVGKWHLGMYRKECLPTRRGFDTYFGYLLGSEDYYSHERCTLID | |
| | ALNVTRCALDFRDGEEVATGYKNMYSTNIFTKRAIALITNHPPEKPL | |
| | FLYLALQSVHEPLQVPEEYLKPYDFIQDKNRHHYAGMVSLMDEAV | |
| | GNVTAALKSSGLWNNTVFIFSTDNGGQTLAGGNNWPLRGRKWSL | |
| | WEGGVRGVGFVASPLLKQKGVKNRELIHISDWLPTLVKLARGHTN | |
| | GTKPLDGFDVWKTISEGSPSPRIELLHNIDPNFVDSSPCPRNSMAPAK | |
| | DDSSLPEYSAFNTSVHAAIRHGNWKLLTGYPGCGYWFPPPSQYNVS | |
| | EIPSSDPPTKTLWLFDIDRDPEERHDLSREYPHIVTKLLSRLQFYHKH | |
| | SVPVYFPAQDPRCDPKATGVWGPWM | |
| 255 | MPGRSCVALVLLAAAVSCAVAQHAPPWTEDCRKSTYPPSGPTYRG | ASAH1 |
| | AVPWYTINLDLPPYKRWHELMLDKAPVLKVIVNSLKNMINTFVPSG | |
| | KIMQVVDEKLPGLLGNFPGPFEEEMKGIAAVTDIPLGEIISFNIFYELF | |
| | TICTSIVAEDKKGHLIHGRNMDFGVFLGWNINNDTWVITEQLKPLTV | |
| | NLDFQRNNKTVFKASSFAGYVGMLTGFKPGLFSLTLNERFSINGGY | |
| | LGILEWILGKKDVMWIGFLTRTVLENSTSYEEAKNLLTKTKILAPAY | |
| | FILGGNQSGEGCVITRDRKESLDVYELDAKQGRWYVVQTNYDRWK | |
| | HPFFLDDRRTPAKMCLNRTSQENISFETMYDVLSTKPVLNKLTVYT | |
| | TLIDVTKGQFETYLRDCPDPCIGW | |
| 256 | MSADSSPLVGSTPTGYGTLTIGTSIDPLSSSVSSVRLSGYCGSPWRVI | ATP13A2 |
| | GYHVVVWMMAGIPLLLFRWKPLWGVRLRLRPCNLAHAETLVIEIR | |
| | DKEDSSWQLFTVQVQTEAIGEGSLEPSPQSQAEDGRSQAAVGAVPE | |
| | GAWKDTAQLHKSEEAVSVGQKRVLRYYLFQGQRYIWIETQQAFYQ | |
| | VSLLDHGRSCDDVHRSRHGLSLQDQMVRKAIYGPNVISIPVKSYPQ | |
| | LLVDEALNPYYGFQAFSIALWLADHYYWYALCIFLISSISICLSLYKT | |
| | RKQSQTLRDMVKLSMRVCVCRPGGEEEWVDSSELVPGDCLVLPQE | |
| | GGLMPCDAALVAGECMVNESSLTGESIPVLKTALPEGLGPYCAETH | |
| | RRHTLFCGTLILQARAYVGPHVLAVVTRTGFCTAKGGLVSSILHPRP | |
| | INFKFYKHSMKFVAALSVLALLGTIYSIFILYRNRVPLNEIVIRALDL | |
| | VTVVVPPALPAAMTVCTLYAQSRLRRQGIFCIHPLRINLGGKLQLVC | |
| | FDKTGTLTEDGLDVMGVVPLKGQAFLPLV | |
| | PEPRRLPVGPLLRALATCHALSRLQDTPVGDPMDLKMVESTGWVL | |
| | EEEPAADSAFGTQVLAVMRPPLWEPQLQAMEEPPVPVSVLHRFPFS | |
| | SALQRMSVVVAWPGATQPEAYVKGSPELVAGLCNPETVPTDFAQM | |
| | LQSYTAAGYRVVALASKPLPTVPSLEAAQQLTRDTVEGDLSLLGLL | |
| | VMRNLLKPQTTPVIQALRRTRIRAVMVTGDNLQTAVTVARGCGMV | |
| | APQEHLHVHATHPERGQPASLEFLPMESPTAVNGVKDPDQAASYTV | |
| | EPDPRSRHLALSGPTFGIIVKHFPKL | |
| | LPKVLVQGTVFARMAPEQKTELVCELQKLQYCVGMCGDGANDCG | |
| | ALKAADVGISLSQAEASVVSPFTSSMASIECVPMVIREGRCSLDTSFS | |
| | VFKYMALYSLTQFISVLILYTINTNLGDLQFLAIDLVITTTVAVLMSR | |
| | TGPALVLGRVRPPGALLSVPVLSSLLLQMVLVTGVQLGGYFLTLAQ | |
| | PWFVPLNRTVAAPDNLPNYENTVVFSLSSFQYLILAAAVSKGAPFRR | |
| | PLYTNVPFLVALALLSSVLVGLVLVPGLLQGPLALRNITDTGFKLLL | |
| | LGLVTLNFVGAFMLESVLDQCLPACLRRLRPKRASKKRFKQLEREL | |
| | AEQPWPPLPAGPLR | |
| 257 | MGGCAGSRRRFSDSEGEETVPEPRLPLLDHQGAHWKNAVGFWLLG | CLN3 |
| | LCNNFSYVVMLSAAHDILSHKRTSGNQSHVDPGPTPIPHNSSSRFDC | |
| | NSVSTAAVLLADILPTLVIKLLAPLGLHLLPYSPRVLVSGICAAGSFV | |
| | LVAFSHSVGTSLCGVVFASISSGLGEVTFLSLTAFYPRAVISWWSSG | |
| | TGGAGLLGALSYLGLTQAGLSPQQTLLSMLGIPALLLASYFLLLTSP | |
| | EAQDPGGEEEAESAARQPLIRTEAPESKPGSSSSLSLRERWTVFKGL | |
| | LWYIVPLVVVYFAEYFINQGLFELLFFWNTSLSHAQQYRWYQMLY | |
| | QAGVFASRSSLRCCRIRFTWALALLQCLNLVFLLADVWFGFLPSIYL | |
| | VFLIILYEGLLGGAAYVNTFHNIALETSDEHREFAMAATCISDTLGIS | |
| | LSGLLALPLHDFLCQLS | |
| 258 | MAQEVDTAQGAEMRRGAGAARGRASWCWALALLWLAVVPGWS | CLN5 |
| | RVSGIPSRRHWPVPYKRFDFRPKPDPYCQAKYTFCPTGSPIPVMEGD | |
| | DDIEVFRLQAPVWEFKYGDLLGHLKIMHDAIGFRSTLTGKNYTME | |
| | WYELFQLGNCTFPHLRPEMDAPFWCNQGAACFFEGIDDVHWKENG | |
| | TLVQVATISGNMFNQMAKWVKQDNETGIYYETWNVKASPEKGAE | |
| | TWFDSYDCSKFVLRTFNKLAEFGAEFKNIETNYTRIFLYSGEPTYLG | |
| | NETSVFGPTGNKTLGLAIKRFYYPFKPHLPTKEFLLSLLQIFDAVIVH | |
| | KQFYLFYNFEYWFLPMKFPFIKITYEEIPLPIRNKTLSGL | |
| 259 | MEATRRRQHLGATGGPGAQLGASFLQARHGSVSADEAARTAPFHL | CLN6 |
| | DLWFYFTLQNWVLDFGRPIAMLVFPLEWFPLNKPSVGDYFHMAYN | |
| | VITPFLLLKLIERSPRTLPRSITYVSIIIFIMGASIHLVGDSVNHRLLFSG | |
| | YQHHLSVRENPIIKNLKPETLIDSFELLYYYDEYLGHCMWYIPFFLIL | |
| | FMYFSGCFTASKAESLIPGPALLLVAPSGLYYWYLVTEGQIFILFIFTF | |
| | FAMLALVLHQKRKRLFLDSNGLFLFSSFALTLLLVALWVAWLWND | |
| | PVLRKKYPGVIYVPEPWAFYTLHVSSRH | |
| 260 | MNPASDGGTSESIFDLDYASWGIRSTLMVAGFVFYLGVFVVCHQLS | CLN8 |
| | SSLNATYRSLVAREKVFWDLAATRAVFGVQSTAAGLWALLGDPVL | |
| | HADKARGQQNWCWFHITTATGFFCFENVAVHLSNLIFRTFDLFLVI | |
| | HHLFAFLGFLGCLVNLQAGHYLAMTTLLLEMSTPFTCVSWMLLKA | |
| | GWSESLFWKLNQWLMIHMFHCRMVLTYHMWWVCFWHWDGLVS | |
| | SLYLPHLTLFLVGLALLTLIINPYWTHKKTQQLLNPVDWNFAQPEA | |
| | KSRPEGNGQLLRKKRP | |
| 261 | MIRNWLTIFILFPLKLVEKCESSVSLTVPPVVKLENGSSTNVSLTLRP | CTNS |
| | PLNATLVITFEITFRSKNITILELPDEVVVPPGVTNSSFQVTSQNVGQL | |
| | TVYLHGNHSNQTGPRIRFLVIRSSAISIINQVIGWIYFVAWSISFYPQV | |
| | IMNWRRKSVIGLSFDFVALNLTGFVAYSVFNIGLLWVPYIKEQFLLK | |
| | YPNGVNPVNSNDVFFSLHAVVLTLIIIVQCCLYERGGQRVSWPAIGF | |
| | LVLAWLFAFVTMIVAAVGVTTWLQFLFCFSYIKLAVTLVKYFPQAY | |
| | MNFYYKSTEGWSIGNVLLDFTGGSFSLLQMFLQSYNNDQWTLIFGD | |
| | PTKFGLGVFSIVFDVVFFIQHFCLYRKRPGYDQLN | |
| 262 | MIRAAPPPLFLLLLLLLLLVSWASRGEAAPDQDEIQRLPGLAKQPSF | CTSA |
| | RQYSGYLKGSGSKHLHYWFVESQKDPENSPVVLWLNGGPGCSSLD | |
| | GLLTEHGPFLVQPDGVTLEYNPYSWNLIANVLYLESPAGVGFSYSD | |
| | DKFYATNDTEVAQSNFEALQDFFRLFPEYKNNKLFLTGESYAGIYIP | |
| | TLAVLVMQDPSMNLQGLAVGNGLSSYEQNDNSLVYFAYYHGLLG | |
| | NRLWSSLQTHCCSQNKCNFYDNKDLECVTNLQEVARIVGNSGLNIY | |
| | NLYAPCAGGVPSHFRYEKDTVVVQD | |
| | LGNIFTRLPLKRMWHQALLRSGDKVRMDPPCTNTTAASTYLNNPY | |
| | VRKALNIPEQLPQWDMCNFLVNLQYRRLYRSMNSQYLKLLSSQKY | |
| | QILLYNGDVDMACNFMGDEWFVDSLNQKMEVQRRPWLVKYGDS | |
| | GEQIAGFVKEFSHIAFLTIKGAGHMVPTDKPLAAFTMFSRFLNKQPY | |
| 263 | MQPSSLLPLALCLLAAPASALVRIPLHKFTSIRRTMSEVGGSVEDLIA | CTSD |
| | KGPVSKYSQAVPAVTEGPIPEVLKNYMDAQYYGEIGIGTPPQCFTV | |
| | VFDTGSSNLWVPSIHCKLLDIACWIHHKYNSDKSSTYVKNGTSFDIH | |
| | YGSGSLSGYLSQDTVSVPCQSASSASALGGVKVERQVFG | |
| | EATKQPGITFIAAKFDGILGMAYPRISVNNVLPVFDNLMQQKLVDQ | |
| | NIFSFYLSRDPDAQPGGELMLGGTDSKYYKGSLSYLNVTRKAYWQ | |
| | VHLDQVEVASGLTLCKEGCEAIVDTGTSLMVGPVDEVRELQKAIGA | |
| | VPLIQGEYMIPCEKVSTLPAITLKLGGKGYKLSPEDYTLKVSQAGKT | |
| | LCLSGFMGMDIPPPSGPLWILGDVFIGRYYTVFDRDNNRVGFAEAA | |
| | RL | |
| 264 | MAPWLQLLSLLGLLPGAVAAPAQPRAASFQAWGPPSPELLAPTRFA | CTSF |
| | LEMFNRGRAAGTRAVLGLVRGRVRRAGQGSLYSLEATLEEPPCND | |
| | PMVCRLPVSKKTLLCSFQVLDELGRHVLLRKDCGPVDTKVPGAGEP | |
| | KSAFTQGSAMISSLSQNHPDNRNETFSSVISLLNEDPLSQDLPVKMA | |
| | SIFKNFVITYNRTYESKEEARWRLSVFVNNMVRAQKIQALDRGTAQ | |
| | YGVTKFSDLTEEEFRTIYLNTLLRKEPGNKMKQAKSVGDLAPPEWD | |
| | WRSKGAVTKVKDQGMCGSCWAFSVTGNVEGQWFLNQGTLLSLSE | |
| | QELLDCDKMDKACMGGLPSNAYSAIKNLGGLETEDDYSYQGHMQ | |
| | SCNFSAEKAKVYINDSVELSQNEQKLAAWLAKRGPISVAINAFGMQ | |
| | FYRHGISRPLRPLCSPWLIDHAVLLVGYGNRSDVPFWAIKNSWGTD | |
| | WGEKGYYYLHRGSGACGVNTMASSAVVD | |
| 265 | MWGLKVLLLPVVSFALYPEEILDTHWELWKKTHRKQYNNKVDEIS | CTSK |
| | RRLIWEKNLKYISIHNLEASLGVHTYELAMNHLGDMTSEEVVQKMT | |
| | GLKVPLSHSRSNDTLYIPEWEGRAPDSVDYRKKGYVTPVKNQGQC | |
| | GSCWAFSSVGALEGQLKKKTGKLLNLSPQNLVDCVSENDGCGGGY | |
| | MTNAFQYVQKNRGIDSEDAYPYVGQEESCMYNPTGKAAKCRGYR | |
| | EIPEGNEKALKRAVARVGPVSVAIDASLTSFQFYSKGVYYDESCNSD | |
| | NLNHAVLAVGYGIQKGNKHWIIKNSWGENWGNKGYILMARNKNN | |
| | ACGIANLASFPKM | |
| 266 | MADQRQRSLSTSGESLYHVLGLDKNATSDDIKKSYRKLALKYHPD | DNAJC5 |
| | KNPDNPEAADKFKEINNAHAILTDATKRNIYDKYGSLGLYVAEQFG | |
| | EENVNTYFVLSSWWAKALFVFCGLLTCCYCCCCLCCCFNCCCGKC | |
| | KPKAPEGEETEFYVSPEDLEAQLQSDEREATDTPIVIQPASATETTQL | |
| | TADSHPSYHTDGFN | |
| 267 | MRAPGMRSRPAGPALLLLLLFLGAAESVRRAQPPRRYTPDWPSLDS | FUCA1 |
| | RPLPAWFDEAKFGVFIHWGVFSVPAWGSEWFWWHWQGEGRPQYQ | |
| | RFMRDNYPPGFSYADFGPQFTARFFHPEEWADLFQAAGAKYVVLT | |
| | TKHHEGFTNWPSPVSWNWNSKDVGPHRDLVGELGTALRKRNIRYG | |
| | LYHSLLEWFHPLYLLDKKNGFKTQHFVSAKTMPELYDLVNSYKPD | |
| | LIWSDGEWECPDTYWNSTNFLSWLYNDSPVKDEVVVNDRWGQNC | |
| | SCHHGGYYNCEDKFKPQSLPDHKWEMCTSIDKFSWGYRRDMALSD | |
| | VTEESEIISELVQTVSLGGNYLLNIGPTKDGLIVPIFQERLLAVGK | |
| | WLSINGEAIYASKPWRVQWEKNTTSVWYTSKGSAVYAIFLHWPEN | |
| | GVLNLESPITTSTTKITMLGIQGDLKWSTDPDKGLFISLPQLPPSAVP | |
| | AEFAWTIKLTGVK | |
| 268 | MGVRHPPCSHRLLAVCALVSLATAALLGHILLHDFLLVPRELSGSSP | GAA |
| | VLEETHPAHQQGASRPGPRDAQAHPGRPRAVPTQCDVPPNSRFDCA | |
| | PDKAITQEQCEARGCCYIPAKQGLQGAQMGQPWCFFPPSYPSYKLE | |
| | NLSSSEMGYTATLTRTTPTFFPKDILTLRLDVMMETENRLHFTIKDP | |
| | ANRRYEVPLETPHVHSRAPSPLYSVEFSEEPFGVIVRRQLDGRVLLN | |
| | TTVAPLFFADQFLQLSTSLPSQYITGLAEHLSPLMLSTSWTRITLWNR | |
| | DLAPTPGANLYGSHPFYLALEDGGSAHGVFLLNSNAMDVVLQPSPA | |
| | LSWRSTGGILDVYIFLGPEPKSVVQQYLDVVGYPFMPPYWGLGFHL | |
| | CRWGYSSTAITRQVVENMTRAHFPLDVQWNDLDYMDSRRDFTFN | |
| | KDGFRDFPAMVQELHQGGRRYMMIVDPAISSSGPAGSYRPYDEGLR | |
| | RGVFITNETGQPLIGKVWPGSTAFPDFTNPTALAWWEDMVAEFHD | |
| | QVPFDGMWIDMNEPSNFIRGSEDGCPNNELENPPYVPGVVGGTLQA | |
| | ATICASSHQFLSTHYNLHNLYGLTEAIASHRALVKARGTRPFVISRST | |
| | FAGHGRYAGHWTGDVWSSWEQLASSVPEILQFNLLGVPLVGADVC | |
| | GFLGNTSEELCVRWTQLGAFYPFMRNHNSLLSLPQEPYSFSEPAQQ | |
| | AMRKALTLRYALLPHLYTLFHQAHVAGETVARPLFLEFPKDSSTWT | |
| | VDHQLLWGEALLITPVLQAGKAEVTGYFPLGTWYDLQTVPVEALG | |
| | SLPPPPAAPREPAIHSEGQWVTLPAPLDTINVHLRAGYIIPLQGPGLT | |
| | TTESRQQPMALAVALTKGGEARGELFWDDGESLEVLERGAYTQVIF | |
| | LARNNTIVNELVRVTSEGAGLQLQKVTVLGVATAPQQVLSNGVPVS | |
| | NFTYSPDTKVLDICVSLLMGEQFLVSWC | |
| 269 | MAEWLLSASWQRRAKAMTAAAGSAGRAAVPLLLCALLAPGGAYV | GALC |
| | LDDSDGLGREFDGIGAVSGGGATSRLLVNYPEPYRSQILDYLFKPNF | |
| | GASLHILKVEIGGDGQTTDGTEPSHMHYALDENYFRGYEWWLMKE | |
| | AKKRNPNITLIGLPWSFPGWLGKGFDWPYVNLQLTAYYVVTWIVG | |
| | AKRYHDLDIDYIGIWNERSYNANYIKILRKMLNYQGLQRVKIIASDN | |
| | LWESISASMLLDAELFKVVDVIGAHYPGTHSAKDAKLTGKKLWSSE | |
| | DFSTLNSDMGAGCWGRILNQNYINGYMTSTIAWNLVASYYEQLPY | |
| | GRCGLMTAQEPWSGHYVVESPVWVSAHTTQFTQPGWYYLKTVGH | |
| | LEKGGSYVALTDGLGNLTIIIETMSHKHSKCIRPFLPYFNVSQQFATF | |
| | VLKGSFSEIPELQVWYTKLGKTSERFLFKQLDSLWLLDSDGSFTLSL | |
| | HEDELFTLTTLTTGRKGSYPLPPKSQPFPSTYKDDFNVDYPFFSEAPN | |
| | FADQTGVFEYFTNIEDPGEHHFTLRQVLNQRPITWAADASNTISIIGD | |
| | YNWTNLTIKCDVYIETPDTGGVFIAGRVNKGGILIRSARGIFFWIFAN | |
| | GSYRVTGDLAGWIIYALGRVEVTAKKWYTLTLTIKGHFTSGMLND | |
| | KSLWTDIPVNFPKNGWAAIGTHSFEFAQFDNFLVEATR | |
| 270 | MAAVVAATRWWQLLLVLSAAGMGASGAPQPPNILLLLMDDMGW | GALNS |
| | GDLGVYGEPSRETPNLDRMAAEGLLFPNFYSANPLCSPSRAALLTG | |
| | RLPIRNGFYTTNAHARNAYTPQEIVGGIPDSEQLLPELLKKAGYVSKI | |
| | VGKWHLGHRPQFHPLKHGFDEWFGSPNCHFGPYDNKARPNIPVYR | |
| | DWEMVGRYYEEFPINLKTGEANLTQIYLQEALDFIKRQARHHPFFL | |
| | YWAVDATHAPVYASKPFLGTSQRGRYGDAVREIDDSIGKILELLQD | |
| | LHVADNTFVFFTSDNGAALISAPEQGGSNGPFLCGKQTTFEGGMRE | |
| | PALAWWPGHVTAGQVSHQLGSIMDLFTTSLALAGLTPPSDRAIDGL | |
| | NLLPTLLQGRLMDRPIFYYRGDTLMAATLGQHKAHFWTWTNSWE | |
| | NFRQGIDFCPGQNVSGVTTHNLEDHTKLPLIFHLGRDPGERFPLSFAS | |
| | AEYQEALSRITSVVQQHQEALVPAQPQLNVCNWAVMNWAPPGCE | |
| | KLGKCLTPPESIPKKCLWSH | |
| 271 | MQLRNPELHLGCALALRFLALVSWDIPGARALDNGLARTPTMGWL | GLA |
| | HWERFMCNLDCQEEPDSCISEKLFMEMAELMVSEGWKDAGYEYL | |
| | CIDDCWMAPQRDSEGRLQADPQRFPHGIRQLANYVHSKGLKLGIYA | |
| | DVGNKTCAGFPGSFGYYDIDAQTFADWGVDLLKFDGCYCDSLENL | |
| | ADGYKHMSLALNRTGRSIVYSCEWPLYMWPFQKPNYTEIRQYCNH | |
| | WRNFADIDDSWKSIKSILDWTSFNQERIVDVAGPGGWNDPDMLVIG | |
| | NFGLSWNQQVTQMALWAIMAAPLFMSNDLRHISPQAKALLQDKD | |
| | VIAINQDPLGKQGYQLRQGDNFEVWERPLSGLAWAVAMINRQEIG | |
| | GPRSYTIAVASLGKGVACNPACFITQLLPVKRKLGFYEWTSRLRSHI | |
| | NPTGTVLLQLENTMQMSLKDLL | |
| 272 | MPGFLVRILPLLLVLLLLGPTRGLRNATQRMFEIDYSRDSFLKDGQP | GLB1 |
| | FRYISGSIHYSRVPRFYWKDRLLKMKMAGLNAIQTYVPWNFHEPW | |
| | PGQYQFSEDHDVEYFLRLAHELGLLVILRPGPYICAEWEMGGLPAW | |
| | LLEKESILLRSSDPDYLAAVDKWLGVLLPKMKPLLYQNGGPVITVQ | |
| | VENEYGSYFACDFDYLRFLQKRFRHHLGDDVVLFTTDGAHKTFLK | |
| | CGALQGLYTTVDFGTGSNITDAFLSQRKCEPKGPLINSEFYTGWLDH | |
| | WGQPHSTIKTEAVASSLYDILARG | |
| | ASVNLYMFIGGTNFAYWNGANSPYAAQPTSYDYDAPLSEAGDLTE | |
| | KYFALRNIIQKFEKVPEGPIPPSTPKFAYGKVTLEKLKTVGAALDILC | |
| | PSGPIKSLYPLTFIQVKQHYGFVLYRTTLPQDCSNPAPLSSPLNGVHD | |
| | RAYVAVDGIPQGVLERNNVITLNITGKAGATLDLLVENMGRVNYG | |
| | AYINDFKGLVSNLTLSSNILTDWTIFPLDTEDAVRSHLGGWGHRDSG | |
| | HHDEAWAHNSSNYTLPAFYMGNFSIPSGIPDLPQDTFIQFPGWTKGQ | |
| | VWINGFNLGRYWPARGPQLTLFVPQHILMTSAPNTITVLELEWAPC | |
| | SSDDPELCAVTFVDRPVIGSSVTYDHPSKPVEKRLMPPPPQKNKDS | |
| | WLDHV | |
| 273 | MQSLMQAPLLIALGLLLAAPAQAHLKKPSQLSSFSWDNCDEGKDPA | GM2A |
| | VIRSLTLEPDPIIVPGNVTLSVMGSTSVPLSSPLKVDLVLEKEVAGLW | |
| | IKIPCTDYIGSCTFEHFCDVLDMLIPTGEPCPEPLRTYGLPCHCPFKEG | |
| | TYSLPKSEFVVPDLELPSWLTTGNYRIESVLSSSGKRLGCIKIAASLK | |
| | GI | |
| 274 | MLFKLLQRQTYTCLSHRYGLYVCFLGVVVTIVSAFQFGEVVLEWSR | GNPTAB |
| | DQYHVLFDSYRDNIAGKSFQNRLCLPMPIDVVYTWVNGTDLELLKE | |
| | LQQVREQMEEEQKAMREILGKNTTEPTKKSEKQLECLLTHCIKVPM | |
| | LVLDPALPANITLKDLPSLYPSFHSASDIFNVAKPKNPSTNVSVVVFD | |
| | STKDVEDAHSGLLKGNSRQTVWRGYLTTDKEVPGLVLMQDLAFLS | |
| | GFPPTFKETNQLKTKLPENLSSKVKLLQLYSEASVALLKLNNPKDFQ | |
| | ELNKQTKKNMTIDGKELTISPA | |
| | YLLWDLSAISQSKQDEDISASRFEDNEELRYSLRSIERHAPWVRNIFI | |
| | VTNGQIPSWLNLDNPRVTIVTHQDVFRNLSHLPTFSSPAIESHIHRIEG | |
| | LSQKFIYLNDDVMFGKDVWPDDFYSHSKGQKVYLTWPVPNCAEGC | |
| | PGSWIKDGYCDKACNNSACDWDGGDCSGNSGGSRYIAGGGGTGSI | |
| | GVGQPWQFGGGINSVSYCNQGCANSWLADKFCDQACNVLSCGFD | |
| | AGDCGQDHFHELYKVILLPNQTHYIIPKGECLPYFSFAEVAKRGVEG | |
| | AYSDNPIIRHASIANKWKTIHLIMHSGMNATTIHFNLTFQNTNDEEF | |
| | KMQITVEVDTREGPKLNSTAQKGYENLVSPITLLPEAEILFEDIPKEK | |
| | RFPKFKRHDVNSTRRAQEEVKIPLVNISLLPKDAQLSLNTLDLQLEH | |
| | GDITLKGYNLSKSALLRSFLMNSQHAKIKNQAIITDETNDSLVAPQE | |
| | KQVHKSILPNSLGVSERLQRLTFPAVSVKVNGHDQGQNPPLDLETT | |
| | ARFRVETHTQKTIGGNVTKEKPPSLIVPLESQMTKEKKITGKEKENS | |
| | RMEENAENHIGVTEVLLGRKLQHYTDSYLGFLPWEKKKYFQDLLD | |
| | EEESLKTQLAYFTDSKNTGRQLKDTFADSLRYVNKILNSKFGFTSRK | |
| | VPAHMPHMIDRIVMQELQDMFPEEFDKTSFHKVRHSEDMQFAFSYF | |
| | YYLMSAVQPLNISQVFDEVDTDQSGVLSDREIRTLATRIHELPLSLQ | |
| | DLTGLEHMLINCSKMLPADITQLNNIPPTQESYYDPNLPPVTKSLVT | |
| | NCKPVTDKIHKAYKDKNKYRFEIMGEEEIAFKMIRTNVSHVVGQLD | |
| | DIRKNPRKFVCLNDNIDHNHKDAQTVKAVLRDFYESMFPIPSQFELP | |
| | REYRNRFLHMHELQEWRAYRDKLKFWTHCVLATLIMFTIFSFFAEQ | |
| | LIALKRKIFPRRRIHKEASPNRIRV | |
| 275 | MAAGLARLLLLLGLSAGGPAPAGAAKMKVVEEPNAFGVNNPFLPQ | GNPTG |
| | ASRLQAKRDPSPVSGPVHLFRLSGKCFSLVESTYKYEFCPFHNVTQH | |
| | EQTFRWNAYSGILGIWHEWEIANNTFTGMWMRDGDACRSRSRQSK | |
| | VELACGKSNRLAHVSEPSTCVYALTFETPLVCHPHALLVYPTLPEAL | |
| | QRQWDQVEQDLADELITPQGHEKLLRTLFEDAGYLKTPEENEPTQL | |
| | EGGPDSLGFETLENCRKAHKELSKEIKRLKGLLTQHGIPYTRPTETS | |
| | NLEHLGHETPRAKSPEQLRGDPG | |
| | LRGSL | |
| 276 | MRLLPLAPGRLRRGSPRHLPSCSPALLLLVLGGCLGVFGVAAGTRR | GNS |
| | PNVVLLLTDDQDEVLGGMTPLKKTKALIGEMGMTFSSAYVPSALC | |
| | CPSRASILTGKYPHNHHVVNNTLEGNCSSKSWQKIQEPNTFPAILRS | |
| | MCGYQTFFAGKYLNEYGAPDAGGLEHVPLGWSYWYALEKNSKYY | |
| | NYTLSINGKARKHGENYSVDYLTDVLANVSLDFLDYKSNFEPFFM | |
| | MIATPAPHSPWTAAPQYQKAFQNVFAPRNKNFNIHGTNKHWLIRQ | |
| | AKTPMTNSSIQFLDNAFRKRWQTLLSVD | |
| | DLVEKLVKRLEFTGELNNTYIFYTSDNGYHTGQFSLPIDKRQLYEFD | |
| | IKVPLLVRGPGIKPNQTSKMLVANIDLGPTILDIAGYDLNKTQMDG | |
| | MSLLPILRGASNLTWRSDVLVEYQGEGRNVTDPTCPSLSPGVSQCFP | |
| | DCVCEDAYNNTYACVRTMSALWNLQYCEFDDQEVFVEVYNLTAD | |
| | PDQITNIAKTIDPELLGKMNYRLMMLQSCSGPTCRTPGVFDPGYRFD | |
| | PRLMFSNRGSVRTRRFSKHLL | |
| 277 | MWTLVSWVALTAGLVAGTRCPDGQFCPVACCLDPGGASYSCCRPL | GRN |
| | LDKWPTTLSRHLGGPCQVDAHCSAGHSCIFTVSGTSSCCPFPEAVAC | |
| | GDGHHCCPRGFHCSADGRSCFQRSGNNSVGAIQCPDSQFECPDFST | |
| | CCVMVDGSWGCCPMPQASCCEDRVHCCPHGAFCDLVHTRCITPTG | |
| | THPLAKKLPAQRTNRAVALSSSVMCPDARSRCPDGSTCCELPSGKY | |
| | GCCPMPNATCCSDHLHCCPQDTVCDLIQSKCLSKENATTDLLTKLP | |
| | AHTVGDVKCDMEVSCPDGYTCCRLQSGAWGCCPFTQAVCCEDHIH | |
| | CCPAGFTCDTQKGTCEQGPHQVPWMEKAPAHLSLPDPQALKRDVP | |
| | CDNVSSCPSSDTCCQLTSGEWGCCPIPEAVCCSDHQHCCPQGYTCV | |
| | AEGQCQRGSEIVAGLEKMPARRASLSHPRDIGCDQHTSCPVGQTCC | |
| | PSLGGSWACCQLPHAVCCEDRQHCCPAGYTCNVKARSCEKEVVSA | |
| | QPATFLARSPHVGVKDVECGEGHFCHDNQTCCRDNRQGWACCPY | |
| | RQGVCCADRRHCCPAGFRCAARGTKCLRREAPRWDAPLRDPALRQ | |
| | LL | |
| 278 | MARGSAVAWAALGPLLWGCALGLQGGMLYPQESPSRECKELDGL | GUSB |
| | WSFRADFSDNRRRGFEEQWYRRPLWESGPTVDMPVPSSFNDISQD | |
| | WRLRHFVGWVWYEREVILPERWTQDLRTRVVLRIGSAHSYAIVWV | |
| | NGVDTLEHEGGYLPFEADISNLVQVGPLPSRLRITIAINNTLTPTTLPP | |
| | GTIQYLTDTSKYPKGYFVQNTYFDFFNYAGLQRSVLLYTTPTTYIDD | |
| | ITVTTSVEQDSGLVNYQISVKGSNLFKLEVRLLDAENKVVANGTGT | |
| | QGQLKVPGVSLWWPYLMHERPAYL | |
| | YSLEVQLTAQTSLGPVSDFYTLPVGIRTVAVTKSQFLINGKPFYFHG | |
| | VNKHEDADIRGKGFDWPLLVKDFNLLRWLGANAFRTSHYPYAEEV | |
| | MQMCDRYGIVVIDECPGVGLALPQFFNNVSLHHHMQVMEEVVRR | |
| | DKNHPAVVMWSVANEPASHLESAGYYLKMVIAHTKSLDPSRPVTF | |
| | VSNSNYAADKGAPYVDVICLNSYYSWYHDYGHLELIQLQLATQFE | |
| | NWYKKYQKPIIQSEYGAETIAGFHQDPPLMFTEEYQKSLLEQYHLG | |
| | LDQKRRKYVVGELIWNFADFMTEQSPTRVLGNKKGIFTRQRQPKSA | |
| | AFLLRERYWKIANETRYPHSVAKSQCLENSLFT | |
| 279 | MTSSRLWFSLLLAAAFAGRATALWPWPQNFQTSDQRYVLYPNNFQ | HEXA |
| | FQYDVSSAAQPGCSVLDEAFQRYRDLLFGSGSWPRPYLTGKRHTLE | |
| | KNVLVVSVVTPGCNQLPTLESVENYTLTINDDQCLLLSETVWGALR | |
| | GLETFSQLVWKSAEGTFFINKTEIEDFPRFPHRGLLLDTSRHYLPLSSI | |
| | LDTLDVMAYNKLNVFHWHLVDDPSFPYESFTFPELMRKGSYNPVT | |
| | HIYTAQDVKEVIEYARLRGIRVLAEFDTPGHTLSWGPGIPGLLTPCY | |
| | SGSEPSGTFGPVNPSLNNTYEFMSTFFLEVSSVFPDFYLHLGGDEVD | |
| | FTCWKSNPEIQDFMRKKGFGEDFKQLESFYIQTLLDIVSSYGKGYVV | |
| | WQEVFDNKVKIQPDTIIQVWREDIPVNYMKELELVTKAGFRALLSA | |
| | PWYLNRISYGPDWKDFYIVEPLAFEGTPEQKALVIGGEACMWGEY | |
| | VDNTNLVPRLWPRAGAVAERLWSNKLTSDLTFAYERLSHFRCELLR | |
| | RGVQAQPLNVGFCEQEFEQT | |
| 280 | MELCGLGLPRPPMLLALLLATLLAAMLALLTQVALVVQVAEAARA | HEXB |
| | PSVSAKPGPALWPLPLSVKMTPNLLHLAPENFYISHSPNSTAGPSCTL | |
| | LEEAFRRYHGYIFGFYKWHHEPAEFQAKTQVQQLLVSITLQSECDA | |
| | FPNISSDESYTLLVKEPVAVLKANRVWGALRGLETFSQLVYQDSYG | |
| | TFTINESTIIDSPRFSHRGILIDTSRHYLPVKIILKTLDAMAFNKFNVLH | |
| | WHIVDDQSFPYQSITFPELSNKGSYSLSHVYTPNDVRMVIEYARLRG | |
| | IRVLPEFDTPGHTLSWGKGQKDLLTPCYSRQNKLDSFGPINPTLNTT | |
| | YSFLTTFFKEISEVFPDQFIHLGGDEVEFKCWESNPKIQDFMRQKGF | |
| | GTDFKKLESFYIQKVLDIIATINKGSIVWQEVFDDKAKLAPGTIVEV | |
| | WKDSAYPEELSRVTASGFPVILSAPWYLDLISYGQDWRKYYKVEPL | |
| | DFGGTQKQKQLFIGGEACLWGEYVDATNLTPRLWPRASAVGERLW | |
| | SSKDVRDMDDAYDRLTRHRCRMVERG | |
| | IAAQPLYAGYCNHENM | |
| 281 | MTGARASAAEQRRAGRSGQARAAERAAGMSGAGRALAALLLAAS | HGSNAT |
| | VLSAALLAPGGSSGRDAQAAPPRDLDKKRHAELKMDQALLLIHNE | |
| | LLWTNLTVYWKSECCYHCLFQVLVNVPQSPKAGKPSAAAASVSTQ | |
| | HGSILQLNDTLEEKEVCRLEYRFGEFGNYSLLVKNIHNGVSEIACDL | |
| | AVNEDPVDSNLPVSIAFLIGLAVIIVISFLRLLLSLDDFNNWISKAISSR | |
| | ETDRLINSELGSPSRTDPLDGDVQPATWRLSALPPRLRSVDTFRGIAL | |
| | ILMVFVNYGGGKYWYFKHASWNGLTVADLVFPWFVFIMGSSIFLS | |
| | MTSILQRGCSKFRLLGKIAWRSFLLICIGIIIVNPNYCLGPLSWDKVRI | |
| | PGVLQRLGVTYFVVAVLELLFAKPVPEHCASERSCLSLRDITSSWPQ | |
| | WLLILVLEGLWLGLTFLLPVPGCPTGYLGPGGIGDFGKYPNCTGGA | |
| | AGYIDRLLLGDDHLYQHPSSAVLYHTEVAYDPEGILGTINSIVMAFL | |
| | GVQAGKILLYYKARTKDILIRFTAWCC | |
| | ILGLISVALTKVSENEGFIPVNKNLWSLSYVTTLSSFAFFILLVLYPVV | |
| | DVKGLWTGTPFFYPGMNSILVYVGHEVFENYFPFQWKLKDNQSHK | |
| | EHLTQNIVATALWVLIAYILYRKKIFWKI | |
| 282 | MAAHLLPICALFLTLLDMAQGFRGPLLPNRPFTTVWNANTQWCLE | HYAL1 |
| | RHGVDVDVSVFDVVANPGQTFRGPDMTIFYSSQLGTYPYYTPTGEP | |
| | VFGGLPQNASLIAHLARTFQDILAAIPAPDFSGLAVIDWEAWRPRW | |
| | AFNWDTKDIYRQRSRALVQAQHPDWPAPQVEAVAQDQFQGAARA | |
| | WMAGTLQLGRALRPRGLWGFYGFPDCYNYDFLSPNYTGQCPSGIR | |
| | AQNDQLGWLWGQSRALYPSIYMPAVLEGTGKSQMYVQHRVAEAF | |
| | RVAVAAGDPNLPVLPYVQIFYDTTNHFLPLDELEHSLGESAAQGAA | |
| | GVVLWVSWENTRTKESCQAIKEYMDTTLGPFILNVTSGALLCSQ | |
| | ALCSGHGRCVRRTSHPKALLLLNPASFSIQLTPGGGPLSLRGALSLE | |
| | DQAQMAVEFKCRCYPGWQAPWCERKSMW | |
| 283 | MPPPRTGRGLLWLGLVLSSVCVALGSETQANSTTDALNVLLIIVDDL | IDS |
| | RPSLGCYGDKLVRSPNIDQLASHSLLFQNAFAQQAVCAPSRVSFLTG | |
| | RRPDTTRLYDFNSYWRVHAGNFSTIPQYFKENGYVTMSVGKVFHP | |
| | GISSNHTDDSPYSWSFPPYHPSSEKYENTKTCRGPDGELHANLLCPV | |
| | DVLDVPEGTLPDKQSTEQAIQLLEKMKTSASPFFLAVGYHKPHIPFR | |
| | YPKEFQKLYPLENITLAPDPEVPDGLPPVAYNPWMDIRQREDVQAL | |
| | NISVPYGPIPVDFQRKIRQSYFASVSYLDTQVGRLLSALDDLQLANS | |
| | THAFTSDHGWALGEHGEWAKYSNFDVATHVPLIFYVPGRTASLPEA | |
| | GEKLFPYLDPFDSASQLMEPGRQSMDLVELVSLFPTLAGLAGLQVP | |
| | PRCPVPSFHVELCREGKNLLKHFRFRDLEEDPYLPGNPRELIAYSQY | |
| | PRPSDIPQWNSDKPSLKDIKIMGYSIRTIDYRYTVWVGFNPDEFLAN | |
| | FSDIHAGELYFVDSDPLQDHNMYNDSQGGDLFQLLMP | |
| 284 | MRPLRPRAALLALLASLLAAPPVAPAEAPHLVHVDAARALWPLRRF | IDUA |
| | WRSTGFCPPLPHSQADQYVLSWDQQLNLAYVGAVPHRGIKQVRTH | |
| | WLLELVTTRGSTGRGLSYNFTHLDGYLDLLRENQLLPGFELMGSAS | |
| | GHFTDFEDKQQVFEWKDLVSSLARRYIGRYGLAHVSKWNFETWNE | |
| | PDHHDFDNVSMTMQGFLNYYDACSEGLRAASPALRLGGPGDSFHT | |
| | PPRSPLSWGLLRHCHDGTNFFTGEAGVRLDYISLHRKGARSSISILEQ | |
| | EKVVAQQIRQLFPKFADTPIYNDEADPLVGWSLPQPWRADVTYAA | |
| | MVVKVIAQHQNLLLANTTSAFPYALLSNDNAFLSYHPHPFAQRTLT | |
| | ARFQVNNTRPPHVQLLRKPVLTAMGLLALLDEEQLWAEVSQAGTV | |
| | LDSNHTVGVLASAHRPQGPADAWRAAVLIYASDDTRAHPNRSVAV | |
| | TLRLRGVPPGPGLVYVTRYLDNGLCSPDGEWRRLGRPVFPTAEQFR | |
| | RMRAAEDPVAAAPRPLPAGGRLTLRPALRLPSLLLVHVCARPEKPP | |
| | GQVTRLRALPLTQGQLVLVWSDEHVGSKCLWTYEIQFSQDGKAYT | |
| | PVSRKPSTFNLFVFSPDTGAVSGSYRVRALDYWARPGPFSDPVPYLE | |
| | VPVPRGPPSPGNP | |
| 285 | MVVVTGREPDSRRQDGAMSSSDAEDDFLEPATPTATQAGHALPLLP | KCTD7 |
| | QEFPEVVPLNIGGAHFTTRLSTLRCYEDTMLAAMFSGRHYIPTDSEG | |
| | RYFIDRDGTHFGDVLNFLRSGDLPPRERVRAVYKEAQYYAIGPLLE | |
| | QLENMQPLKGEKVRQAFLGLMPYYKDHLERIVEIARLRAVQRKAR | |
| | FAKLKVCVFKEEMPITPYECPLLNSLRFERSESDGQLFEHHCEVDVS | |
| | FGPWEAVADVYDLLHCLVTDLSAQGLTVDHQCIGVCDKHLVNHY | |
| | YCKRPIYEFKITWW | |
| 286 | MVCFRLFPVPGSGLVLVCLVLGAVRSYALELNLTDSENATCLYAK | LAMP2 |
| | WQMNFTVRYETTNKTYKTVTISDHGTVTYNGSICGDDQNGPKIAV | |
| | QFGPGFSWIANFTKAASTYSIDSVSFSYNTGDNTTFPDAEDKGILTV | |
| | DELLAIRIPLNDLFRCNSLSTLEKNDVVQHYWDVLVQAFVQNGTVS | |
| | TNEFLCDKDKTSTVAPTIHTTVPSPTTTPTPKEKPEAGTYSVNNGND | |
| | TCLLATMGLQLNITQDKVASVININPNTTHSTGSCRSHTALLRLNSS | |
| | TIIKYLDFVFAVKNENRFYLKEVNISMYLVNGSVFSIANNNLSYWDA | |
| | PLGSSYMCNKEQTVSVSGAFQINTFDLRVQPFNVTQGKYSTAQDCS | |
| | ADDDNFLVPIAVGAALAGVLILVLLAYFIGLKHHHAGYEQF | |
| 287 | MGAYARASGVCARGCLDSAGPWTMSRALRPPLPPLCFFLLLLAAA | MAN2B1 |
| | GARAGGYETCPTVQPNMLNVHLLPHTHDDVGWLKTVDQYFYGIK | |
| | NDIQHAGVQYILDSVISALLADPTRRFIYVEIAFFSRWWHQQTNATQ | |
| | EVVRDLVRQGRLEFANGGWVMNDEAATHYGAIVDQMTLGLRFLE | |
| | DTFGNDGRPRVAWHIDPFGHSREQASLFAQMGFDGFFFGRLDYQD | |
| | KWVRMQKLEMEQVWRASTSLKPPTADLFTGVLPNGYNPPRNLCW | |
| | DVLCVDQPLVEDPRSPEYNAKELVDYFLNVATAQGRYYRTNHTVM | |
| | TMGSDFQYENANMWFKNLDKLIRLVNAQQAKGSSVHVLYSTPAC | |
| | YLWELNKANLTWSVKHDDFFPYADGPHQFWTGYFSSRPALKRYER | |
| | LSYNFLQVCNQLEALVGLAANVGPYGSGDSAPLNEAMAVLQHHD | |
| | AVSGTSRQHVANDYARQLAAGWGPCEVLLSNALARLRGFKDHFTF | |
| | CQQLNISICPLSQTAARFQVIVYNPLGRKVNWMVRLPVSEGVFVVK | |
| | DPNGRTVPSDVVIFPSSDSQAHPPELLFSASLPALGFSTYSVAQVPR | |
| | WKPQARAPQPIPRRSWSPALTIENEHIRATFDPDTGLLMEIMNMNQ | |
| | QLLLPVRQTFFWYNASIGDNESDQASGAYIFRPNQQKPLPVSRWAQI | |
| | HLVKTPLVQEVHQNFSAWCSQVVRLYPGQRHLELEWSVGPIPVGD | |
| | TWGKEVISRFDTPLETKGRFYTDSNGREILERRRDYRPTWKLNQTEP | |
| | VAGNYYPVNTRIYITDGNMQLTVLTDRSQGGSSLRDGSLELMVHRR | |
| | LLKDDGRGVSEPLMENGSGAWVRGRHLVLLDTAQAAAAGHRLLA | |
| | EQEVLAPQVVLAPGGGAAYNLGAPPRTQFSGLRRDLPPSVHLLTLA | |
| | SWGPEMVLLRLEHQFAVGEDSGRNLSAPVTLNLRDLFSTFTITRLQE | |
| | TTLVANQLREAASRLKWTTNTGPTPHQTPYQLDPANITLEPMEIRTF | |
| | LASVQWKEVDG | |
| 288 | MRLHLLLLLALCGAGTTAAELSYSLRGNWSICNGNGSLELPGAVPG | MANBA |
| | CVHSALFQQGLIQDSYYRFNDLNYRWVSLDNWTYSKEFKIPFEISK | |
| | WQKVNLILEGVDTVSKILFNEVTIGETDNMFNRYSFDITNVVRDVNS | |
| | IELRFQSAVLYAAQQSKAHTRYQVPPDCPPLVQKGECHVNFVRKEQ | |
| | CSFSWDWGPSFPTQGIWKDVRIEAYNICHLNYFTFSPIYDKSAQEWN | |
| | LEIESTFDVVSSKPVGGQVIVAIPKLQTQQTYSIELQPGKRIVELFVNI | |
| | SKNITVETWWPHGHGNQTGYNMTVLFELDGGLNIEKSAKVYFRTV | |
| | ELIEEPIKGSPGLSFYFKINGFPIFLKGSNWIPADSFQDRVTSELLRLLL | |
| | QSVVDANMNTLRVWGGGIYEQDEFYELCDELGIMVWQDFMFACA | |
| | LYPTDQGFLDSVTAEVAYQIKRLKSHPSIIIWSGNNENEEALMMNW | |
| | YHISFTDRPIYIKDYVTLYVKNIRELVLAGDKSRPFITSSPTNGAETV | |
| | AEAWVSQNPNSNYFGDVHFYDYISDC | |
| | WNWKVFPKARFASEYGYQSWPSFSTLEKVSSTEDWSFNSKFSLHRQ | |
| | HHEGGNKQMLYQAGLHFKLPQSTDPLRTFKDTIYLTQVMQAQCVK | |
| | TETEFYRRSRSEIVDQQGHTMGALYWQLNDIWQAPSWASLEYGGK | |
| | WKMLHYFAQNFFAPLLPVGFENENTFYIYGVSDLHSDYSMTLSVRV | |
| | HTWSSLEPVCSRVTERFVMKGGEAVCLYEEPVSELLRRCGNCTRES | |
| | CVVSFYLSADHELLSPTNYHFLSSPKEAVGLCKAQITAIISQQGDIFV | |
| | FDLETSAVAPFVWLDVGSIPGRFSDNGFLMTEKTRTILFYPWEPTSK | |
| | NELEQSFHVTSLTDIY | |
| 289 | MTAPAGPRGSETERLLTPNPGYGTQAGPSPAPPTPPEEEDLRRRLKY | MCOLN1 |
| | FFMSPCDKFRAKGRKPCKLMLQVVKILVVTVQLILFGLSNQLAVTF | |
| | REENTIAFRHLFLLGYSDGADDTFAAYTREQLYQAIFHAVDQYLAL | |
| | PDVSLGRYAYVRGGGDPWTNGSGLALCQRYYHRGHVDPANDTFDI | |
| | DPMVVTDCIQVDPPERPPPPPSDDLTLLESSSSYKNLTLKFHKLVNV | |
| | TIHFRLKTINLQSLINNEIPDCYTFSVLITFDNKAHSGRIPISLETQAHI | |
| | QECKHPSVFQHGDNSFRLLFDVVVILTCSLSFLLCARSLLRGFLLQN | |
| | EFVGFMWRQRGRVISLWERLEFVNGWYILLVTSDVLTISGTIMKIGI | |
| | EAKNLASYDVCSILLGTSTLLVWVGVIRYLTFFHNYNILIATLRVALP | |
| | SVMRFCCCVAVIYLGYCFCGWIVLGPYHVKFRSLSMVSECLFSLING | |
| | DDMFVTFAAMQAQQGRSSLVWLFSQLYLYSFISLFIYMVLSLFIALI | |
| | TGAYDTIKHPGGAGAEESELQAYIAQCQDSPTSGKFRRGSGSACSLL | |
| | CCCGRDPSEEHSLLVN | |
| 290 | MAGLRNESEQEPLLGDTPGSREWDILETEEHYKSRWRSIRILYLTMF | MFSD8 |
| | LSSVGFSVVMMSIWPYLQKIDPTADTSFLGWVIASYSLGQMVASPIF | |
| | GLWSNYRPRKEPLIVSILISVAANCLYAYLHIPASHNKYYMLVARGL | |
| | LGIGAGNVAVVRSYTAGATSLQERTSSMANISMCQALGFILGPVFQ | |
| | TCFTFLGEKGVTWDVIKLQINMYTTPVLLSAFLGILNIILILAILREHR | |
| | VDDS | |
| | GRQCKSINFEEASTDEAQVPQGNIDQVAVVAINVLFFVTLFIFALFET | |
| | IITPLTMDMYAWTQEQAVLYNGIILAALGVEAVVIFLGVKLLSKKIG | |
| | ERAILLGGLIVVWVGFFILLPWGNQFPKIQWEDLHNNSIPNTTFGEIII | |
| | GLWKSPMEDDNERPTGCSIEQAWCLYTPVIHLAQFLTSAVLIGLGYP | |
| | VCNLMSYTLYSKILGPKPQGVYMGWLTASGSGARILGPMFISQVYA | |
| | HWGPRWAFSLVCGIIVLTITLLGVVYKRLIALSVRYGRIQE | |
| 291 | MLLKTVLLLGHVAQVLMLDNGLLQTPPMGWLAWERFRCNINCDE | NAGA |
| | DPKNCISEQLFMEMADRMAQDGWRDMGYTYLNIDDCWIGGRDAS | |
| | GRLMPDPKRFPHGIPFLADYVHSLGLKLGIYADMGNFTCMGYPGTT | |
| | LDKVVQDAQTFAEWKVDMLKLDGCFSTPEERAQGYPKMAAALNA | |
| | TGRPIAFSCSWPAYEGGLPPRVNYSLLADICNLWRNYDDIQDSWWS | |
| | VLSILNWFVEHQDILQPVAGPGHWNDPDMLLIGNFGLSLEQSRAQM | |
| | ALWTVLAAPLLMSTDLRTISAQNMDILQNPLMIKINQDPLGIQGRRI | |
| | HKEKSLIEVYMRPLSNKASALVFFSCRTDMPYRYHSSLGQLNFTGS | |
| | VIYEAQDVYSGDIISGLRDETNFTVIINPSGVVMWYLYPIKNLEMSQ | |
| | Q | |
| 292 | MEAVAVAAAVGVLLLAGAGGAAGDEAREAAAVRALVARLLGPGP | NAGLU |
| | AADFSVSVERALAAKPGLDTYSLGGGGAARVRVRGSTGVAAAAGL | |
| | HRYLRDFCGCHVAWSGSQLRLPRPLPAVPGELTEATPNRYRYYQN | |
| | VCTQSYSFVWWDWARWEREIDWMALNGINLALAWSGQEAIWQR | |
| | VYLALGLTQAEINEFFTGPAFLAWGRMGNLHTWDGPLPPSWHIKQL | |
| | YLQHRVLDQMRSFGMTPVLPAFAGHVPEAVTRVFPQVNVTKMGS | |
| | WGHFNCSYSCSFLLAPEDPIFPIIGSLFLRELIKEFGTDHIYGADTFNE | |
| | MQPPSSEPSYLAAATTAVYEAMTAVDTEAVWLLQGWLFQHQPQF | |
| | WGPAQIRAVLGAVPRGRLLVLDLFAESQPVYTRTASFQGQPFIWCM | |
| | LHNFGGNHGLFGALEAVNGGPEAARLFPNSTMVGTGMAPEGISQN | |
| | EVVYSLMAELGWRKDPVPDLAAWVTSFAARRYGVSHPDAGAAWR | |
| | LLLRSVYNCSGEACRGHNRSPLVRRPSLQMNTSIWYNRSDVFEAWR | |
| | LLLTSAPSLATSPAFRYDLLDLTRQAVQELVSLYYEEARSAYLSKEL | |
| | ASLLRAGGVLAYELLPALDEVLASDSRFLLGSWLEQARAAAVSEAE | |
| | ADFYEQNSRYQLTLWGPEGNILDYANKQLAGLVANYYTPRWRLFL | |
| | EALVDSVAQGIPFQQHQFDKNVFQLEQAFVLSKQRYPSQPRGDTVD | |
| | LAKKIFLKYYPRWVAGSW | |
| 293 | MTGERPSTALPDRRWGPRILGFWGGCRVWVFAAIFLLLSLAASWSK | NEU1 |
| | AENDFGLVQPLVTMEQLLWVSGRQIGSVDTFRIPLITATPRGTLLAF | |
| | AEARKMSSSDEGAKFIALRRSMDQGSTWSPTAFIVNDGDVPDGLNL | |
| | GAVVSDVETGVVFLFYSLCAHKAGCQVASTMLVWSKDDGVSWST | |
| | PRNLSLDIGTEVFAPGPGSGIQKQREPRKGRLIVCGHGTLERDGVFC | |
| | LLSDDHGASWRYGSGVSGIPYGQPKQENDFNPDECQPYELPDGSVV | |
| | INARNQNNYHCHCRIVLRSYDACDTLRPRDVTFDPELVDPVVAAGA | |
| | VVTSSGIVFFSNPAHPEFRVNLTLRWSFSNGTSWRKET | |
| | VQLWPGPSGYSSLATLEGSMDGEEQAPQLYVLYEKGRNHYTESISV | |
| | AKISVYGTL | |
| 294 | MTARGLALGLLLLLLCPAQVFSQSCVWYGECGIAYGDKRYNCEYS | NPC1 |
| | GPPKPLPKDGYDLVQELCPGFFFGNVSLCCDVRQLQTLKDNLQLPL | |
| | QFLSRCPSCFYNLLNLFCELTCSPRQSQFLNVTATEDYVDPVTNQTK | |
| | TNVKELQYYVGQSFANAMYNACRDVEAPSSNDKALGLLCGKDAD | |
| | ACNATNWIEYMFNKDNGQAPFTITPVFSDFPVHGMEPMNNATKGC | |
| | DESVDEVTAPCSCQDCSIVCGPKPQPPPPPAPWTILGLDAMYVIMWI | |
| | TYMAFLLVFFGAFFAVWCYRKRYFVSEYTPIDSNIAFSVNASDKGE | |
| | ASCCDPVSAAFEGCLRRLFTRWGSFCVRNPGCVIFFSLVFITACSSGL | |
| | VFVRVTTNPVDLWSAPSSQARLEKEYFDQHFGPFFRTEQLIIRAPLT | |
| | DKHIYQPYPSGADVPFGPPLDIQILHQVLDLQIAIENITASYDNETVT | |
| | LQDICLAPLSPYNTNCTILSVLNYFQNSHSVLDHKKGDDFFVYADY | |
| | HTHFLYCVRAPASLNDTSLLHDPCLGTFGGPVFPWLVLGGYDDQN | |
| | YNNATALVITFPVNNYYNDTEKLQRAQAWEKEFINFVKNYKNPNL | |
| | TISFTAERSIEDELNRESDSDVFTVVISYAIMFLYISLALGHMKSCRRL | |
| | LVDSKVSLGIAGILIVLSSVACSLGVFSYIGLPLTLIVIEVIPFLVLAVG | |
| | VDNIFILVQAYQRDERLQGETLDQQLGRVLGEVAPSMFLSSFSETVA | |
| | FFLGALSVMPAVHTFSLFAGLAVFIDFLLQITCFV | |
| | SLLGLDIKRQEKNRLDIFCCVRGAEDGTSVQASESCLFRFFKNSYSPL | |
| | LLKDWMRPIVIAIFVGVLSFSIAVLNKVDIGLDQSLSMPDDSYMVDY | |
| | FKSISQYLHAGPPVYFVLEEGHDYTSSKGQNMVCGGMGCNNDSLV | |
| | QQIFNAAQLDNYTRIGFAPSSWIDDYFDWVKPQSSCCRVDNITDQFC | |
| | NASVVDPACVRCRPLTPEGKQRPQGGDFMRFLPMFLSDNPNPKCG | |
| | KGGHAAYSSAVNILLGHGTRVGATYFMTYHTVLQTSADFIDALKK | |
| | ARLIASNVTETMGINGSAYRVFPYSVFYVFYEQYLTIIDDTIFNLGVS | |
| | LGAIFLVTMVLLGCELWSAVIMCATIAMVLVNMFGVMWLWGISLN | |
| | AVSLVNLVMSCGISVEFCSHITRAFTVSMKGSRVERAEEALAHMGS | |
| | SVFSGITLTKFGGIVVLAFAKSQIFQIFYFRMYLAMVLLGATHGLIFL | |
| | PVLLSYIGPSVNKAKSCATEERYKGTERERLLNF | |
| 295 | MRFLAATFLLLALSTAAQAEPVQFKDCGSVDGVIKEVNVSPCPTQP | NPC2 |
| | CQLSKGQSYSVNVTFTSNIQSKSSKAVVHGILMGVPVPFPIPEPDGC | |
| | KSGINCPIQKDKTYSYLNKLPVKSEYPSIKLVVEWQLQDDKNQSLFC | |
| | WEIPVQIVSHL | |
| 296 | MSCPVPACCALLLVLGLCRARPRNALLLLADDGGFESGAYNNSAIA | SGSH |
| | TPHLDALARRSLLFRNAFTSVSSCSPSRASLLTGLPQHQNGMYGLH | |
| | QDVHHFNSFDKVRSLPLLLSQAGVRTGIIGKKHVGPETVYPFDFAYT | |
| | EENGSVLQVGRNITRIKLLVRKFLQTQDDRPFFLYVAFHDPHRCGHS | |
| | QPQYGTFCEKFGNGESGMGRIPDWTPQAYDPLDVLVPYFVPNTPAA | |
| | RADLAAQYTTVGRMDQGVGLVLQELRDAGVLNDTLVIFTSDNGIPF | |
| | PSGRTNLYWPGTAEPLLVSSPE | |
| | HPKRWGQVSEAYVSLLDLTPTILDWFSIPYPSYAIFGSKTIHLTGRSL | |
| | LPALEAEPLWATVFGSQSHHEVTMSYPMRSVQHRHFRLVHNLNFK | |
| | MPFPIDQDFYVSPTFQDLLNRTTAGQPTGWYKDLRHYYYRARWEL | |
| | YDRSRDPHETQNLATDPRFAQLLEMLRDQLAKWQWETHDPWVCA | |
| | PDGVLEEKLSPQCQPLHNEL | |
| 297 | MASPGCLWLLAVALLPWTCASRALQHLDPPAPLPLVIWHGMGDSC | PPT1 |
| | CNPLSMGAIKKMVEKKIPGIYVLSLEIGKTLMEDVENSFFLNVNSQV | |
| | TTVCQALAKDPKLQQGYNAMGFSQGGQFLRAVAQRCPSPPMINLIS | |
| | VGGQHQGVFGLPRCPGESSHICDFIRKTLNAGAYSKVVQERLVQAE | |
| | YWHDPIKEDVYRNHSIFLADINQERGINESYKKNLMALKKFVMVKF | |
| | LNDSIVDPVDSEWFGFYRSGQAKETIPLQETSLYTQDRLGLKEMDN | |
| | AGQLVFLATEGDHLQLSEEWFYAHIIPFLG | |
| 298 | MYALFLLASLLGAALAGPVLGLKECTRGSAVWCQNVKTASDCGA | PSAP |
| | VKHCLQTVWNKPTVKSLPCDICKDVVTAAGDMLKDNATEEEILVY | |
| | LEKTCDWLPKPNMSASCKEIVDSYLPVILDIIKGEMSRPGEVCSALN | |
| | LCESLQKHLAELNHQKQLESNKIPELDMTEVVAPFMANIPLLLYPQ | |
| | DGPRSKPQPKDNGDVCQDCIQMVTDIQTAVRTNSTFVQALVEHVK | |
| | EECDRLGPGMADICKNYISQYSEIAIQMMMHMQPKEICALVGFCDE | |
| | VKEMPMQTLVPAKVASKNVIPALELVEPIKKHEVPAKSDVYCEVCE | |
| | FLVKEVTKLIDNNKTEKEILDAFDKMCSKLPKSLSEECQEVVDTYGS | |
| | SILSILLEEVSPELVCSMLHLCSGTRLPALTVHVTQPKDGGFCEVCK | |
| | KLVGYLDRNLEKNSTKQEILAALEKGCSFLPDPYQKQCDQFVAEYE | |
| | PVLIEILVEVMDPSFVCLKIGACPSAHKPLLGTEKCIWGPSYWCQNT | |
| | ETAAQCNAVEHCKRHVWN | |
| 299 | MRSPVRDLARNDGEESTDRTPLLPGAPRAEAAPVCCSARYNLAILA | SLC17A5 |
| | FFGFFIVYALRVNLSVALVDMVDSNTTLEDNRTSKACPEHSAPIKVH | |
| | HNQTGKKYQWDAETQGWILGSFFYGYIITQIPGGYVASKIGGKMLL | |
| | GFGILGTAVLTLFTPIAADLGVGPLIVLRALEGLGEGVTFPAMHAM | |
| | WSSWAPPLERSKLLSISYAGAQLGTVISLPLSGIICYYMNWTYVFYF | |
| | FGTIGIFWFLLWIWLVSDTPQKHKRISHYEKEYILSSLRNQLSSQKSV | |
| | PWVPILKSLPLWAIVVAHFSYNWTFYTLLTLLPTYMKEILRFNVQEN | |
| | GFLSSLPYLGSWLCMILSGQAADNLRAKWNFSTLCVRRIFSLIGMIG | |
| | PAVFLVAAGFIGCDYSLAVAFLTISTTLGGFCSSGFSINHLDIAPSYA | |
| | GILLGITNTFATIPGMVGPVIAKSLTPDNTVGEWQTVFYIAAAINVFG | |
| | AIFFTLFAKGEVQNWALNDHHGHRH | |
| 300 | MPRYGASLRQSCPRSGREQGQDGTAGAPGLLWMGLVLALALALAL | SMPD1 |
| | ALALSDSRVLWAPAEAHPLSPQGHPARLHRIVPRLRDVFGWGNLTC | |
| | PICKGLFTAINLGLKKEPNVARVGSVAIKLCNLLKIAPPAVCQSIVHL | |
| | FEDDMVEVWRRSVLSPSEACGLLLGSTCGHWDIFSSWNISLPTVPKP | |
| | PPKPPSPPAPGAPVSRILFLTDLHWDHDYLEGTDPDCADPLCCRRGS | |
| | GLPPASRPGAGYWGEYSKCDLPLRTLESLLSGLGPAGPFDMVYWT | |
| | GDIPAHDVWHQTRQDQLRALTTVTALVRKFLGPVPVYPAVGNHES | |
| | TPVNSFPPPFIEGNHSSRWLYEAMAKAWEPWLPAEALRTLRIGGFY | |
| | ALSPYPGLRLISLNMNFCSRENFWLLINSTDPAGQLQWLVGELQAA | |
| | EDRGDKVHIIGHIPPGHCLKSWSWNYYRIVARYENTLAAQFFGHTH | |
| | VDEFEVFYDEETLSRPLAVAFLAPSATTYIGLNPGYRVYQIDGNYSG | |
| | SSHVVLDHETYILNLTQANIPGAIPHWQLLYRARETYGLPNTLPTAW | |
| | HNLVYRMRGDMQLFQTFWFLYHKGHPPSEPCGTPCRLATLCAQLS | |
| | ARADSPALCRHLMPDGSLPEAQSLWPRPLFC | |
| 301 | MAAPALGLVCGRCPELGLVLLLLLLSLLCGAAGSQEAGTGAGAGSL | SUMF1 |
| | AGSCGCGTPQRPGAHGSSAAAHRYSREANAPGPVPGERQLAHSKM | |
| | VPIPAGVFTMGTDDPQIKQDGEAPARRVTIDAFYMDAYEVSNTEFE | |
| | KFVNSTGYLTEAEKFGDSFVFEGMLSEQVKTNIQQAVAAAPWWLP | |
| | VKGANWRHPEGPDSTILHRPDHPVLHVSWNDAVAYCTWAGKRLP | |
| | TEAEWEYSCRGGLHNRLFPWGNKLQPKGQHYANIWQGEFPVTNTG | |
| | EDGFQGTAPVDAFPPNGYGLYNIVGNAWEWTSDWWTVHHSVEET | |
| | LNPKGPPSGKDRVKKGGSYMCHRSYCYRYRCAARSQNTPDSSASN | |
| | LGFRCAADRLPTMD | |
| 302 | MGLQACLLGLFALILSGKCSYSPEPDQRRTLPPGWVSLGRADPEEEL | TPP1 |
| | SLTFALRQQNVERLSELVQAVSDPSSPQYGKYLTLENVADLVRPSPL | |
| | TLHTVQKWLLAAGAQKCHSVITQDFLTCWLSIRQAELLLPGAEFHH | |
| | YVGGPTETHVVRSPHPYQLPQALAPHVDFVGGLHRFPPTSSLRQRPE | |
| | PQVTGTVGLHLGVTPSVIRKRYNLTSQDVGSGTSNNSQACAQFLEQ | |
| | YFHDSDLAQFMRLFGGNFAHQASVARVVGQQGRGRAGIEASLDVQ | |
| | YLMSAGANISTWVYSSPGRHEG | |
| | QEPFLQWLMLLSNESALPHVHTVSYGDDEDSLSSAYIQRVNTELMK | |
| | AAARGLTLLFASGDSGAGCWSVSGRHQFRPTFPASSPYVTTVGGTS | |
| | FQEPFLITNEIVDYISGGGFSNVFPRPSYQEEAVTKFLSSSPHLPPSSYF | |
| | NASGRAYPDVAALSDGYWVVSNRVPIPWVSGTSASTPVFGGILSLIN | |
| | EHRILSGRPPLGFLNPRLYQQHGAGLFDVTRGCHESCLDEEVEGQGF | |
| | CSGPGWDPVTGWGTPNFPALLKTLLNP | |
| 303 | MSDKLPYKVADIGLAAWGRKALDIAENEMPGLMRMRERYSASKPL | AHCY |
| | KGARIAGCLHMTVETAVLIETLVTLGAEVQWSSCNIFSTQDHAAAAI | |
| | AKAGIPVYAWKGETDEEYLWCIEQTLYFKDGPLNMILDDGGDLTN | |
| | LIHTKYPQLLPGIRGISEETTTGVHNLYKMMANGILKVPAINVNDSV | |
| | TKSKFDNLYGCRESLIDGIKRATDVMIAGKVAVVAGYGDVGKGCA | |
| | QALRGFGARVIITEIDPINALQAAMEGYEVTTMDEACQEGNIFVTTT | |
| | GCIDIILGRHFEQMKDDAIVCNIG | |
| | HFDVEIDVKWLNENAVEKVNIKPQVDRYRLKNGRRIILLAEGRLVN | |
| | LGCAMGHPSFVMSNSFTNQVMAQIELWTHPDKYPVGVHFLPKKLD | |
| | EAVAEAHLGKLNVKLTKLTEKQAQYLGMSCDGPFKPDHYRY | |
| 304 | MVDSVYRTRSLGVAAEGLPDQYADGEAARVWQLYIGDTRSRTAEY | GNMT |
| | KAWLLGLLRQHGCQRVLDVACGTGVDSIMLVEEGFSVTSVDASDK | |
| | MLKYALKERWNRRHEPAFDKWVIEEANWMTLDKDVPQSAEGGFD | |
| | AVICLGNSFAHLPDCKGDQSEHRLALKNIASMVRAGGLLVIDHRNY | |
| | DHILSTGCAPPGKNIYYKSDLTKDVTTSVLIVNNKAHMVTLDYTVQ | |
| | VPGAGQDGSPGLSKFRLSYYPHCLASFTELLQAAFGGKCQHSVLGD | |
| | FKPYKPGQTYIPCYFIHVLKRTD | |
| 305 | MNGPVDGLCDHSLSEGVFMFTSESVGEGHPDKICDQISDAVLDAHL | MAT1A |
| | KQDPNAKVACETVCKTGMVLLCGEITSMAMVDYQRVVRDTIKHIG | |
| | YDDSAKGFDFKTCNVLVALEQQSPDIAQCVHLDRNEEDVGAGDQG | |
| | LMFGYATDETEECMPLTIILAHKLNARMADLRRSGLLPWLRPDSKT | |
| | QVTVQYMQDNGAVIPVRIHTIVISVQHNEDITLEEMRRALKEQVIRA | |
| | VVPAKYLDEDTVYHLQPSGRFVIGGPQGDAGVTGRKIIVDTYGGW | |
| | GAHGGGAFSGKDYTKVDRSAAYAARWVAKSLVKAGLCRRVLVQ | |
| | VSYAIGVAEPLSISIFTYGTSQKTERELLDVVHKNFDLRPGVIVRDLD | |
| | LKKPIYQKTACYGHFGRSEFPWEVPRKLVF | |
| 306 | MEKGPVRAPAEKPRGARCSNGFPERDPPRPGPSRPAEKPPRPEAKSA | GCH1 |
| | QPADGWKGERPRSEEDNELNLPNLAAAYSSILSSLGENPQRQGLLK | |
| | TPWRAASAMQFFTKGYQETISDVLNDAIFDEDHDEMVIVKDIDMFS | |
| | MCEHHLVPFVGKVHIGYLPNKQVLGLSKLARIVEIYSRRLQVQERL | |
| | TKQIAVAITEALRPAGVGVVVEATHMCMVMRGVQKMNSKTVTST | |
| | MLGVFREDPKTREEFLTLIRS | |
| 307 | MAGKAHRLSAEERDQLLPNLRAVGWNELEGRDAIFKQFHFKDFNR | PCBD1 |
| | AFGFMTRVALQAEKLDHHPEWFNVYNKVHITLSTHECAGLSERDIN | |
| | LASFIEQVAVSMT | |
| 308 | MSTEGGGRRCQAQVSRRISFSASHRLYSKFLSDEENLKLFGKCNNP | PTS |
| | NGHGHNYKVVVTVHGEIDPATGMVMNLADLKKYMEEAIMQPLDH | |
| | KNLDMDVPYFADVVSTTENVAVYIWDNLQKVLPVGVLYKVKVYE | |
| | TDNNIVVYKGE | |
| 309 | MAAAAAAGEARRVLVYGGRGALGSRCVQAFRARNWWVASVDVV | QDPR |
| | ENEEASASIIVKMTDSFTEQADQVTAEVGKLLGEEKVDAILCVAGG | |
| | WAGGNAKSKSLFKNCDLMWKQSIWTSTISSHLATKHLKEGGLLTL | |
| | AGAKAALDGTPGMIGYGMAKGAVHQLCQSLAGKNSGMPPGAAAI | |
| | AVLPVTLDTPMNRKSMPEADFSSWTPLEFLVETFHDWITGKNRPSS | |
| | GSLIQVVTTEGRTELTPAYF | |
| 310 | MEGGLGRAVCLLTGASRGFGRTLAPLLASLLSPGSVLVLSARNDEA | SPR |
| | LRQLEAELGAERSGLRVVRVPADLGAEAGLQQLLGALRELPRPKGL | |
| | QRLLLINNAGSLGDVSKGFVDLSDSTQVNNYWALNLTSMLCLTSSV | |
| | LKAFPDSPGLNRTVVNISSLCALQPFKGWALYCAGKAARDMLFQV | |
| | LALEEPNVRVLNYAPGPLDTDMQQLARETSVDPDMRKGLQELKAK | |
| | GKLVDCKVSAQKLLSLLEKDEFKSGAHVDFYDK | |
| 311 | MDAILNYRSEDTEDYYTLLGCDELSSVEQILAEFKVRALECHPDKHP | DNAJC12 |
| | ENPKAVETFQKLQKAKEILTNEESRARYDHWRRSQMSMPFQQWEA | |
| | LNDSVKTSMHWVVRGKKDLMLEESDKTHTTKMENEECNEQRERK | |
| | KEELASTAEKTEQKEPKPLEKSVSPQNSDSSGFADVNGWHLRFRWS | |
| | KDAPSELLRKFRNYEI | |
| 312 | MLLPAPALRRALLSRPWTGAGLRWKHTSSLKVANEPVLAFTQGSPE | ALDH4A1 |
| | RDALQKALKDLKGRMEAIPCVVGDEEVWTSDVQYQVSPFNHGHK | |
| | VAKFCYADKSLLNKAIEAALAARKEWDLKPIADRAQIFLKAADMLS | |
| | GPRRAEILAKTMVGQGKTVIQAEIDAAAELIDFFRFNAKYAVELEG | |
| | QQPISVPPSTNSTVYRGLEGFVAAISPFNFTAIGGNLAGAPALMGNV | |
| | VLWKPSDTAMLASYAVYRILREAGLPPNIIQFVPADGPLFGDTVTSS | |
| | EHLCGINFTGSVPTFKHLWKQVAQ | |
| | NLDRFHTFPRLAGECGGKNFHFVHRSADVESVVSGTLRSAFEYGGQ | |
| | KCSACSRLYVPHSLWPQIKGRLLEEHSRIKVGDPAEDFGTFFSAVID | |
| | AKSFARIKKWLEHARSSPSLTILAGGKCDDSVGYFVEPCIVESKDPQ | |
| | EPIMKEEIFGPVLSVYVYPDDKYKETLQLVDSTTSYGLTGAVFSQDK | |
| | DVVQEATKVLRNAAGNFYINDKSTGSIVGQQPFGGARASGTNDKP | |
| | GGPHYILRWTSPQVIKETHKPLGDWSYAYMQ | |
| 313 | MALRRALPALRPCIPRFVQLSTAPASREQPAAGPAAVPGGGSATAV | PRODH |
| | RPPVPAVDFGNAQEAYRSRRTWELARSLLVLRLCAWPALLARHEQ | |
| | LLYVSRKLLGQRLFNKLMKMTFYGHFVAGEDQESIQPLLRHYRAFG | |
| | VSAILDYGVEEDLSPEEAEHKEMESCTSAAERDGSGTNKRDKQYQA | |
| | HRAFGDRRNGVISARTYFYANEAKCDSHMETFLRCIEASGRVSDDG | |
| | FIAIKLTALGRPQFLLQFSEVLAKWRCFFHQMAVEQGQAGLAAMDT | |
| | KLEVAVLQESVAKLGIASRAEIEDW | |
| | FTAETLGVSGTMDLLDWSSLIDSRTKLSKHLVVPNAQTGQLEPLLSR | |
| | FTEEEELQMTRMLQRMDVLAKKATEMGVRLMVDAEQTYFQPAISR | |
| | LTLEMQRKFNVEKPLIFNTYQCYLKDAYDNVTLDVELARREGWCF | |
| | GAKLVRGAYLAQERARAAEIGYEDPINPTYEATNAMYHRCLDYVL | |
| | EELKHNAKAKVMVASHNEDTVRFALRRMEELGLHPADHQVYFGQ | |
| | LLGMCDQISFPLGQAGYPVYKYVPYGPVMEVLPYLSRRALENSSLM | |
| | KGTHRERQLLWLELLRRLRTGNLFHRPA | |
| 314 | MTTYSDKGAKPERGRFLHFHSVTFWVGNAKQAASFYCSKMGFEPL | HPD |
| | AYRGLETGSREVVSHVIKQGKIVFVLSSALNPWNKEMGDHLVKHG | |
| | DGVKDIAFEVEDCDYIVQKARERGAKIMREPWVEQDKFGKVKFAV | |
| | LQTYGDTTHTLVEKMNYIGQFLPGYEAPAFMDPLLPKLPKCSLEMI | |
| | DHIVGNQPDQEMVSASEWYLKNLQFHRFWSVDDTQVHTEYSSLRSI | |
| | VVANYEESIKMPINEPAPGKKKSQIQEYVDYNGGAGVQHIALKTEDI | |
| | ITAIRHLRERGLEFLSVPSTYYKQLREKLKTAKIKVKENIDALEELKI | |
| | LVDYDEKGYLLQIFTKPVQDRPTLFLEVIQRHNHQGFGAGNFNSLF | |
| | KAFEEEQNLRGNLTNMETNGVVPGM | |
| 315 | MEFSSPSREECPKPLSRVSIMAGSLTGLLLLQAVSWASGARPCIPKSF | GBA |
| | GYSSVVCVCNATYCDSFDPPTFPALGTFSRYESTRSGRRMELSMGPI | |
| | QANHTGTGLLLTLQPEQKFQKVKGFGGAMTDAAALNILALSPPAQ | |
| | NLLLKSYFSEEGIGYNIIRVPMASCDFSIRTYTYADTPDDFQLHNFSL | |
| | PEEDTKLKIPLIHRALQLAQRPVSLLASPWTSPTWLKTNGAVNGKGS | |
| | LKGQP | |
| | GDIYHQTWARYFVKFLDAYAEHKLQFWAVTAENEPSAGLLSGYPF | |
| | QCLGFTPEHQRDFIARDLGPTLANSTHHNVRLLMLDDQRLLLPHWA | |
| | KVVLTDPEAAKYVHGIAVHWYLDFLAPAKATLGETHRLFPNTMLF | |
| | ASEACVGSKFWEQSVRLGSWDRGMQYSHSIITNLLYHVVGWTDW | |
| | NLALNPEGGPNWVRNFVDSPIIVDITKDTFYKQPMFYHLGHFSKFIP | |
| | EGSQRVGLVASQKNDLDAVALMHPDGSAVVVVLNRSSKDVPLTIK | |
| | DPAVGFLETISPGYSIHTYLWRRQ | |
| 316 | MAELKYISGFGNECSSEDPRCPGSLPEGQNNPQVCPYNLYAEQLSGS | HGD |
| | AFTCPRSTNKRSWLYRILPSVSHKPFESIDEGQVTHNWDEVDPDPNQ | |
| | LRWKPFEIPKASQKKVDFVSGLHTLCGAGDIKSNNGLAIHIFLCNTS | |
| | MENRCFYNSDGDFLIVPQKGNLLIYTEFGKMLVQPNEICVIQRGMRF | |
| | SIDVFEETRGYILEVYGVHFELPDLGPIGANGLANPRDFLIPIAWYED | |
| | RQVPGGYTVINKYQGKLFAAKQDVSPFNVVAWHGNYTPYKYNLK | |
| | NFMVINSVAFDHADPSIFTVLTAKSVRPGVAIADFVIFPPRWGVADK | |
| | TFRPPYYHRNCMSEFMGLIRGHYEAKQGGFLPGGGSLHSTMTPHGP | |
| | DADCFEKASKVKLAPERIADGTMAFMFESSLSLAVTKWGLKASRCL | |
| | DENYHKCWEPLKSHFTPNSRNPAEPN | |
| 317 | MGVLGRVLLWLQLCALTQAVSKLWVPNTDFDVAANWSQNRTPCA | AMN |
| | GGAVEFPADKMVSVLVQEGHAVSDMLLPLDGELVLASGAGFGVSD | |
| | VGSHLDCGAGEPAVFRDSDRFSWHDPHLWRSGDEAPGLFFVDAER | |
| | VPCRHDDVFFPPSASFRVGLGPGASPVRVRSISALGRTFTRDEDLAV | |
| | FLASRAGRLRFHGPGALSVGPEDCADPSGCVCGNAEAQPWICAALL | |
| | QPLGGRCPQAACHSALRPQGQCCDLCGAVVLLTHGPAFDLERYRA | |
| | RILDTFLGLPQYHGLQVAVSKVPRSSRLREADTEIQVVLVENGPETG | |
| | GAGRLARALLADVAENGEALGVLEATMRESGAHVWGSSAAGLAG | |
| | GVAAAVLLALLVLLVAPPLLRRAGRLRWRRHEAAAPAGAPLGFRN | |
| | PVFDVTASEELPLPRRLSLVPKAAADSTSHSYFVNPLFAGAEAEA | |
| 318 | MSGGWMAQVGAWRTGALGLALLLLLGLGLGLEAAASPLSTPTSAQ | CD320 |
| | AAGPSSGSCPPTKFQCRTSGLCVPLTWRCDRDLDCSDGSDEEECRIE | |
| | PCTQKGQCPPPPGLPCPCTGVSDCSGGTDKKLRNCSRLACLAGELR | |
| | CTLSDDCIPLTWRCDGHPDCPDSSDELGCGTNEILPEGDATTMGPPV | |
| | TLESVTSLRNATTMGPPVTLESVPSVGNATSSSAGDQSGSPTAYGVI | |
| | AAAAVLSASLVTATLLLLSWLRAQERLRPLGLLVAMKESLLLSEQK | |
| | TSLP | |
| 319 | MMNMSLPFLWSLLTLLIFAEVNGEAGELELQRQKRSINLQQPRMAT | CUBN |
| | ERGNLVFLTGSAQNIEFRTGSLGKIKLNDEDLSECLHQIQKNKEDIIE | |
| | LKGSAIGLPQNISSQIYQLNSKLVDLERKFQGLQQTVDKKVCSSNPC | |
| | QNGGTCLNLHDSFFCICPPQWKGPLCSADVNECEIYSGTPLSCQNGG | |
| | TCVNTMGSYSCHCPPETYGPQCASKYDDCEGGSVARCVHGICEDL | |
| | MREQAGEPKYSCVCDAGWMFSPNSPACTLDRDECSFQPGPCSTLV | |
| | QCFNTQGSFYCGACPTGWQGNGYICEDINECEINNGGCSVAPPVEC | |
| | VNTPGSSHCQACPPGYQGDGRVCTLTDICSVSNGGCHPDASCSSTL | |
| | GSLPLCTCLPGYTGNGYGPNGCVQLSNICLSHPCLNGQCIDTVSGYF | |
| | CKCDSGWTGVNCTENINECLSNPCLNGGTCVDGVDSFSCECTRLWT | |
| | GALCQVPQQVCGESLSGINGSFSYRSPDVGYVHDVNCFWVIKTEMG | |
| | KVLRITFTFFRLESMDNCPHEFLQVYDGDSSSAFQLGRFCGSSLPHE | |
| | LLSSDNALYFHLYSEHLRNGRGFTVRWETQQPECGGILTGPYGSIKS | |
| | PGYPGNYPPGRDCVWIVVTSPDLLVTFTFGTLSLEHHDDCNKDYLEI | |
| | RDGPLYQDPLLGKFCTTFSVPPLQTTGPFARIHFHSDSQISDQGFHIT | |
| | YLTSPSDLRCGGNYTDPEGELFLPELSGPFTHTRQCVYMMKQPQGE | |
| | QIQINFTHVELQCQSDSSQNYIEVRDGETLLGKVCGNGTISHIKSITN | |
| | SVWIRFKIDASVEKASFRAVYQVACGDELTGEGVIRSPFFPNVYPGE | |
| | RTCRWTIHQPQSQVILLNFTVFEIGSSAHCETDYVEIGSSSILGSPENK | |
| | KYCGTDIPSFITSVYNFLYVTFVKSSSTENHGFMAKFSAEDLACGEIL | |
| | TESTGTIQSPGHPNVYPHGINCTWHILVQPNHLIHLMFETFHLEFHY | |
| | NCTNDYLEVYDTDSETSLGRYCGKSIPPSLTSSGNSL | |
| | MLVFVTDSDLAYEGFLINYEAISAATACLQDYTDDLGTFTSPNFPNN | |
| | YPNNWECIYRITVRTGQLIAVHFTNFSLEEAIGNYYTDFLEIRDGGYE | |
| | KSPLLGIFYGSNLPPTIISHSNKLWLKFKSDQIDTRSGFSAYWDGSST | |
| | GCGGNLTTSSGTFISPNYPMPYYHSSECYWWLKSSHGSAFELEFKDF | |
| | HLEHHPNCTLDYLAVYDGPSSNSHLLTQLCGDEKPPLIRSSGDSMFI | |
| | KLR | |
| | TDEGQQGRGFKAEYRQTCENVVIVNQTYGILESIGYPNPYSENQHC | |
| | NWTIRATTGNTVNYTFLAFDLEHHINCSTDYLELYDGPRQMGRYCG | |
| | VDLPPPGSTTSSKLQVLLLTDGVGRREKGFQMQWFVYGCGGELSG | |
| | ATGSFSSPGFPNRYPPNKECIWYIRTDPGSSIQLTIHDFDVEYHSRCN | |
| | FDVLEIYGGPDFHSPRIAQLCTQRSPENPMQVSSTGNELAIRFKTDLS | |
| | INGRGFNASWQAVTGGCGGIFQAPSGEIHSPNYPSPYRSNTDCSWVI | |
| | RVDRNHRVLLNFTDFDLEPQDSCIMAYDGLSSTMSRLARTCGREQL | |
| | ANPIVSSGNSLFLRFQSGPSRQNRGFRAQFRQACGGHILTSSFDTVSS | |
| | PRFPANYPNNQNCSWIIQAQPPLNHITLSFTHFELERSTTCARDFVEIL | |
| | DGGHEDAPLRGRYCGTDMPHPITSFSSALTLRFVSDSSISAGGFHTT | |
| | VTASVSACGGTFYMAEGIFNSPGYPDIYPPNVECVWNIVSSPGNRLQ | |
| | LSFISFQLEDSQDCSRDFVEIREGNATGHLVGRYCGNSFPLNYSSIVG | |
| | HTLWVRFISDGSGSGTGFQATFMKIFGNDNIVGTHGKVASPFWPEN | |
| | YPHNSNYQWTVNVNASHVVHGRILEMDIEEIQNCYYDKLRIYDGPS | |
| | IHARLIGAYCGTQTESFSSTGNSLTFHFYSDSSISGKGFLLEWFAVDA | |
| | PDGVLPTIAPGACGGFLRTGDAPVFLFSPGWPDSYSNRVDCTWLIQ | |
| | APDSTVELNILSLDIESHRTCAYDSLVIRDGDNNLAQQLAVLCGREIP | |
| | GPIRSTGEYMFIRFTSDSSVTRAGFNASFHKSCGGYLHADRGIITSPK | |
| | YPETYPSNLNCSWHVLVQSGLTIAVHFEQPFQIPNGDSSCNQGDYLV | |
| | LRNGPDICSPPLGPPGGNGHFCGSHASSTLFTSDNQMFVQFISDHSNE | |
| | GQGFKIKYEAKSLACGGNVYIHDADSAGYVTSPNHPHNYPPHADCI | |
| | WILAAPPETRIQLQFEDRFDIEVTPNCTSNYLELRDGVDSDAPILSKF | |
| | CGTSLPSSQWSSGEVMYLRFRSDNSPTHVGFKAKYSIAQCGGRVPG | |
| | QSGVVESIGHPTLPYRDNLFCEWHLQGLSGHYLTISFEDFNLQNSSG | |
| | CEKDFVEIWDNHTSGNILGRYCGNTIPDSIDTSSNTAVVRFVTDGSV | |
| | TASGFRLRFESSMEECGGDLQGSIGTFTSPNYPNPNPHGRICEWRITA | |
| | PEGRRITLMFNNLRLATHPSCNNEHVIVFNGIRSNSPQLEKLCSSVNV | |
| | SNEIKSSGNTMKVIFFTDGSRPYGGFTASYTSSEDAVCGGSLPNTPE | |
| | GNFTSPGYDGVRNYSRNLNCEWTLSNPNQGNSSISIHFEDFYLESHQ | |
| | DCQFDVLEFRVGDADGPLMWRLCGPSKPTLPLVIPYSQVWIHFVTN | |
| | ERVEHIGFHAKYSFTDCGGIQIGDSGVITSPNYPNAYDSLTHCSSLLE | |
| | APQGHTITLTFSDFDIEPHTTCAWDSVTVRNGGSPESPIIGQYCGNSN | |
| | PRTIQSGSNQLVVTFNSDHSLQGGGFYATWNTQTLGCGGIFHSDNG | |
| | TIRSPHWPQNFPENSRCSWTAITHKSKHLEISFDNNFLIPSGDGQCQN | |
| | SFVKVWAGTEEVDKALLATGCGNVAPGPVITPSNTFTAVFQSQEAP | |
| | AQGFSASFVSRCGSNFTGPSGYIISPNYPKQYDNNMNCTYVIEANPL | |
| | SVVLLTFVSFHLEARSAVTGSCVNDGVHIIRGYSVMSTPFATVCG | |
| | DEMPAPLTIAGPVLLNFYSNEQITDFGFKFSYRIISCGGVFNFSSGIITS | |
| | PAYSYADYPNDMHCLYTITVSDDKVIELKFSDFDVVPSTSCSHDYL | |
| | AIYDGANTSDPLLGKFCGSKRPPNVKSSNNSMLLVFKTDSFQTAKG | |
| | WKMSFRQTLGPQQGCGGYLTGSNNTFASPDSDSNGMYDKNLNCV | |
| | WIIIAPVNKVIHLTFNTFALEAASTRQRCLYDYVKLYDGDSENANLA | |
| | GTFCGSTVPAPFISSGNFLTVQFISDLTLEREGFNATYTIMDMPCGGT | |
| | YNATWTPQNISSPNSSDPDVPFSICTWVIDSPPHQQVKITVWALQLT | |
| | SQDCTQNYLQLQDSPQGHGNSRFQFCGRNASAVPVFYSSMSTAMVI | |
| | FKSGVVNRNSRMSFTYQIADCNRDYHKAFGNLRSPGWPDNYDNDK | |
| | DCTVTLTAPQNHTISLFFHSLGIENSVECRNDFLEVRNGSNSNSPLLG | |
| | KYCGTLLPNPVFSQNNELYLRFKSDSVTSDRGYEIIWTSSPSGCGGT | |
| | LYGDRGSFTSPGYPGTYPNNTYCEWVLVAPAGRLVTINFYFISIDDP | |
| | GDCVQNYLTLYDGPNASSPSSGPYCGGDTSIAPFVASSNQVFIKFHA | |
| | DYARRPSAFRLTWDS | |
| 320 | MAWFALYLLSLLWATAGTSTQTQSSCSVPSAQEPLVNGIQVLMENS | GIF |
| | VTSSAYPNPSILIAMNLAGAYNLKAQKLLTYQLMSSDNNDLTIGQL | |
| | GLTIMALTSSCRDPGDKVSILQRQMENWAPSSPNAEASAFYGPSLAI | |
| | LALCQKNSEATLPIAVRFAKTLLANSSPFNVDTGAMATLALTCMYN | |
| | KIPVGSEEGYRSLFGQVLKDIVEKISMKIKDNGIIGDIYSTGLAMQAL | |
| | SVTPEPSKKEWNCKKTTDMILNEIKQGKFHNPMSIAQILPSLKGKTY | |
| | LDVPQVTCSPDHEVQPTLPSNPGPGPTSASNITVIYTINNQLRGVELL | |
| | FNETINVSVKSGSVLLVVLEEAQRKNPMFKFETTMTSWGLVVSSIN | |
| | NIAENVNHKTYWQFLSGVTPLNEGVADYIPFNHEHITANFTQY | |
| 321 | MRQSHQLPLVGLLLFSFIPSQLCEICEVSEENYIRLKPLLNTMIQSNY | TCN1 |
| | NRGTSAVNVVLSLKLVGIQIQTLMQKMIQQIKYNVKSRLSDVSSGE | |
| | LALIILALGVCRNAEENLIYDYHLIDKLENKFQAEIENMEAHNGTPL | |
| | TNYYQLSLDVLALCLFNGNYSTAEVVNHFTPENKNYYFGSQFSVDT | |
| | GAMAVLALTCVKKSLINGQIKADEGSLKNISIYTKSLVEKILSEKKE | |
| | NGLIGN | |
| | TFSTGEAMQALFVSSDYYNENDWNCQQTLNTVLTEISQGAFSNPNA | |
| | AAQVLPALMGKTFLDINKDSSCVSASGNFNISADEPITVTPPDSQSYI | |
| | SVNYSVRINETYFTNVTVLNGSVFLSVMEKAQKMNDTIFGFTMEER | |
| | SWGPYITCIQGLCANNNDRTYWELLSGGEPLSQGAGSYVVRNGENL | |
| | EVRWSKY | |
| 322 | MRHLGAFLFLLGVLGALTEMCEIPEMDSHLVEKLGQHLLPWMDRL | TCN2 |
| | SLEHLNPSIYVGLRLSSLQAGTKEDLYLHSLKLGYQQCLLGSAFSED | |
| | DGDCQGKPSMGQLALYLLALRANCEFVRGHKGDRLVSQLKWFLE | |
| | DEKRAIGHDHKGHPHTSYYQYGLGILALCLHQKRVHDSVVDKLLY | |
| | AVEPFHQGHHSVDTAAMAGLAFTCLKRSNFNPGRRQRITMAIRTVR | |
| | EEILKAQTPEGHFGNVYSTPLALQFLMTSPMRGAELGTACLKARVA | |
| | LLASLQDGAFQNALMISQLLPVLNHKTYIDLIFPDCLAPRVMLEPAA | |
| | ETIPQTQEIISVTLQVLSLLPPYRQSISVLAGSTVEDVLKKAHELGGFT | |
| | YETQASLSGPYLTSVMGKAAGEREFWQLLRDPNTPLLQGIADYRPK | |
| | DGETIELRLVSW | |
| 323 | MQQKTKLFLQALKYSIPHLGKCMQKQHLNHYNFADHCYNRIKLKK | PREPL |
| | YHLTKCLQNKPKISELARNIPSRSFSCKDLQPVKQENEKPLPENMDA | |
| | FEKVRTKLETQPQEEYEIINVEVKHGGFVYYQEGCCLVRSKDEEAD | |
| | NDNYEVLFNLEELKLDQPFIDCIRVAPDEKYVAAKIRTEDSEASTCVI | |
| | IKLSDQPVMEASFPNVSSFEWVKDEEDEDVLFYTFQRNLRCHDVYR | |
| | ATFGDNKRNERFYTEKDPSYFVFLYLTKDSRFLTINIMNKTTSEVWL | |
| | IDGLSPWDPPVLIQKRIHGVLYYVEHRDDELYILTNVGEPTEFKLMR | |
| | TAADTPAIMNWDLFFTMKRNTKVIDLDMFKDHCVLFLKHSNLLYV | |
| | NVIGLADDSVRSLKLPPWACGFIMDTNSDPKNCPFQLCSPIRPPKYY | |
| | TYKFAEGKLFEETGHEDPITKTSRVLRLEAKSKDGKLVPMTVFHKT | |
| | DSEDLQKKPLLVHVYGAYGMDLKMNFRPERRVLVDDGWILAYCH | |
| | VRGGGELGLQWHADGRLTKKLNGLADLEACIKTLHGQGFSQPSLT | |
| | TLTAFSAGGVLAGALCNSNPELVRAVTLEAPFLDVLNTMMDTTLPL | |
| | T | |
| | LEELEEWGNPSSDEKHKNYIKRYCPYQNIKPQHYPSIHITAYENDER | |
| | VPLKGIVSYTEKLKEAIAEHAKDTGEGYQTPNIILDIQPGGNHVIEDS | |
| | HKKITAQIKFLYEELGLDSTSVFEDLKKYLKF | |
| 324 | MAFANLRKVLISDSLDPCCRKILQDGGLQVVEKQNLSKEELIAELQD | PHGDH |
| | CEGLIVRSATKVTADVINAAEKLQVVGRAGTGVDNVDLEAATRKGI | |
| | LVMNTPNGNSLSAAELTCGMIMCLARQIPQATASMKDGKWERKKF | |
| | MGTELNGKTLGILGLGRIGREVATRMQSFGMKTIGYDPIISPEVSASF | |
| | GVQQLPLEEIWPLCDFITVHTPLLPSTTGLLNDNTFAQCKKGVRVVN | |
| | CARGGIVDEGALLRALQSGQCAGAALDVFTEEPPRDRALVDHENVI | |
| | SCPHLGASTKEAQSRCGEEIA | |
| | VQFVDMVKGKSLTGVVNAQALTSAFSPHTKPWIGLAEALGTLMRA | |
| | WAGSPKGTIQVITQGTSLKNAGNCLSPAVIVGLLKEASKQADVNLV | |
| | NAKLLVKEAGLNVTTSHSPAAPGEQGFGECLLAVALAGAPYQAVG | |
| | LVQGTTPVLQGLNGAVFRPEVPLRRDLPLLLFRTQTSDPAMLPTMIG | |
| | LLAEAGVRLLSYQTSLVSDGETWHVMGISSLLPSLEAWKQHVTEAF | |
| | QFHF | |
| 325 | MDAPRQVVNFGPGPAKLPHSVLLEIQKELLDYKGVGISVLEMSHRS | PSAT1 |
| | SDFAKIINNTENLVRELLAVPDNYKVIFLQGGGCGQFSAVPLNLIGL | |
| | KAGRCADYVVTGAWSAKAAEEAKKFGTINIVHPKLGSYTKIPDPST | |
| | WNLNPDASYVYYCANETVHGVEFDFIPDVKGAVLVCDMSSNFLSK | |
| | PVDVSKFGVIFAGAQKNVGSAGVTVVIVRDDLLGFALRECPSVLEY | |
| | KVQAGNSSLYNTPPCFSIYVMGLVLEWIKNNGGAAAMEKLSSIKSQ | |
| | TIYEIIDNSQGFYVCPVEPQNRSKMNIPFRIGNAKGDDALEKRFLDK | |
| | ALELNMLSLKGHRSVGGIRASLYNAVTIEDVQKLAAFMKKFLEMH | |
| | QL | |
| 326 | MVSHSELRKLFYSADAVCFDVDSTVIREEGIDELAKICGVEDAVSE | PSPH |
| | MTRRAMGGAVPFKAALTERLALIQPSREQVQRLIAEQPPHLTPGIRE | |
| | LVSRLQERNVQVFLISGGFRSIVEHVASKLNIPATNVFANRLKFYFN | |
| | GEYAGFDETQPTAESGGKGKVIKLLKEKFHFKKIIMIGDGATDMEA | |
| | CPPADAFIGFGGNVIRQQVKDNAKWYITDFVELLGELEE | |
| 327 | MQRAVSVVARLGFRLQAFPPALCRPLSCAQEVLRRTPLYDFHLAHG | AMT |
| | GKMVAFAGWSLPVQYRDSHTDSHLHTRQHCSLFDVSHMLQTKILG | |
| | SDRVKLMESLVVGDIAELRPNQGTLSLFTNEAGGILDDLIVTNTSEG | |
| | HLYVVSNAGCWEKDLALMQDKVRELQNQGRDVGLEVLDNALLAL | |
| | QGPTAAQVLQAGVADDLRKLPFMTSAVMEVFGVSGCRVTRCGYT | |
| | GEDGVEISVPVAGAVHLATAILKNPEVKLAGLAARDSLRLEAGLCL | |
| | YGNDIDEHTTPVEGSLSWTLGKRRRAAMDFPGAKVIVPQLKGRVQ | |
| | RRRVGLMCEGAPMRAHSPILNMEGTKIGTVTSGCPSPSLKKNVAMG | |
| | YVPCEYSRPGTMLLVEVRRKQQMAVVSKMPFVPTNYYTLK | |
| 328 | MALRVVRSVRALLCTLRAVPSPAAPCPPRPWQLGVGAVRTLRTGP | GCSH |
| | ALLSVRKFTEKHEWVTTENGIGTVGISNFAQEALGDVVYCSLPEVG | |
| | TKLNKQDEFGALESVKAASELYSPLSGEVTEINEALAENPGLVNKSC | |
| | YEDGWLIKMTLSNPSELDELMSEEAYEKYIKSIEE | |
| 329 | MQSCARAWGLRLGRGVGGGRRLAGGSGPCWAPRSRDSSSGGGDS | GLDC |
| | AAAGASRLLERLLPRHDDFARRHIGPGDKDQREMLQTLGLASIDELI | |
| | EKTVPANIRLKRPLKMEDPVCENEILATLHAISSKNQIWRSYIGMGY | |
| | YNCSVPQTILRNLLENSGWITQYTPYQPEVSQGRLESLLNYQTMVC | |
| | DITGLDMANASLLDEGTAAAEALQLCYRHNKRRKFLVDPRCHPQTI | |
| | AVVQTRAKYTGVLTELKLPCEMDFSGKDVSGVLFQYPDTEGKVED | |
| | FTELVERAHQSGSLACCATDLLALC | |
| | ILRPPGEFGVDIALGSSQRFGVPLGYGGPHAAFFAVRESLVRMMPGR | |
| | MVGVTRDATGKEVYRLALQTREQHIRRDKATSNICTAQALLANMA | |
| | AMFAIYHGSHGLEHIARRVHNATLILSEGLKRAGHQLQHDLFFDTL | |
| | KIQCGCSVKEVLGRAAQRQINFRLFEDGTLGISLDETVNEKDLDDLL | |
| | WIFGCESSAELVAESMGEECRGIPGSVFKRTSPFLTHQVFNSYHSET | |
| | NIVRYMKKLENKDISLVHSMIPLGSCTMKLNSSSELAPITWKEFANI | |
| | HPFVPLDQAQGYQQLFRELEKDLCELTGYDQVCFQPNSGAQGEYA | |
| | GLATIRAYLNQKGEGHRTVCLIPKSAHGTNPASAHMAGMKIQPVEV | |
| | DKYGNIDAVHLKAMVDKHKENLAAIMITYPSTNGVFEENISDVCDL | |
| | IHQHGGQVYLDGANMNAQVGICRPGDFGSDVSHLNLHKTFCIPHG | |
| | GGGPGMGPIGVKKHLAPFLPNHPVISLKRNEDACPVGTVSAAPWGS | |
| | SSILPISWAYIKMMGGKGLKQATETAILNANYMAKRLETHYRILFR | |
| | GARGYVGHEFILDTRPFKKSANIEAVDVAKRLQDYGFHAPTMSWP | |
| | VAGTLMVEPTESEDKAELDRFCDAMISIRQEIADIEEGRIDPRVNPLK | |
| | MSPHSLTCVTSSHWDRPYSREVAAFPLPFVKPENKFWPTIARIDDIY | |
| | GDQHLVCTCPPMEVYESPFSEQKRASS | |
| 330 | MSLRCGDAARTLGPRVFGRYFCSPVRPLSSLPDKKKELLQNGPDLQ | LIAS |
| | DFVSGDLADRSTWDEYKGNLKRQKGERLRLPPWLKTEIPMGKNYN | |
| | KLKNTLRNLNLHTVCEEARCPNIGECWGGGEYATATATIMLMGDT | |
| | CTRGCRFCSVKTARNPPPLDASEPYNTAKAIAEWGLDYVVLTSVDR | |
| | DDMPDGGAEHIAKTVSYLKERNPKILVECLTPDFRGDLKAIEKVALS | |
| | GLDVYAHNVETVPELQSKVRDPRANFDQSLRVLKHAKKVQPDVIS | |
| | KTSIMLGLGENDEQVYATMKALREADVDCLTLGQYMQPTRRHLK | |
| | VEEYITPEKFKYWEKVGNELGFHYTASGPLVRSSYKAGEFFL | |
| | KNLVAKRKTKDL | |
| 331 | MAATARRGWGAAAVAAGLRRRFCHMLKNPYTIKKQPLHQFVQRP | NFU1 |
| | LFPLPAAFYHPVRYMFIQTQDTPNPNSLKFIPGKPVLETRTMDFPTPA | |
| | AAFRSPLARQLFRIEGVKSVFFGPDFITVTKENEELDWNLLKPDIYAT | |
| | IMDFFASGLPLVTEETPSGEAGSEEDDEVVAMIKELLDTRIRPTVQE | |
| | DGGDVIYKGFEDGIVQLKLQGSCTSCPSSIITLKNGIQNMLQFYIPEV | |
| | EGVEQVMDDESDEKEANSP | |
| 332 | MSGGDTRAAIARPRMAAAHGPVAPSSPEQVTLLPVQRSFFLPPFSGA | SLC6A9 |
| | TPSTSLAESVLKVWHGAYNSGLLPQLMAQHSLAMAQNGAVPSEAT | |
| | KRDQNLKRGNWGNQIEFVLTSVGYAVGLGNVWRFPYLCYRNGGG | |
| | AFMFPYFIMLIFCGIPLFFMELSFGQFASQGCLGVWRISPMFKGVGY | |
| | GMMVVSTYIGIYYNVVICIAFYYFFSSMTHVLPWAYCNNPWNTHD | |
| | CAGVLDASNLTNGSRPAALPSNLSHLLNHSLQRTSPSEEYWRLYVL | |
| | KLSDDIGNFGEVRLPLLGCLGVSWLVVFLCLIRGVKSSGKVVYFTA | |
| | TFPYVVLTILFVRGVTLEGAFDGIMYYLTPQWDKILEAKVWGDAAS | |
| | QIFYSLGCAWGGLITMASYNKFHNNCYRDSVIISITNCATSVYAGFV | |
| | IFSILGFMANHLGVDVSRVADHGPGLAFVAYPEALTLLPISPLWSLL | |
| | FFFMLILLGLGTQFCLLETLVTAIVDEVGNEWILQKKTYVTLGVAVA | |
| | GFLLGIPLTSQAGIYWLLLMDNYAASFSLVVISCIMCVAIMYIYGHR | |
| | NYFQDIQMMLGFPPPLFFQICWRFVSPAIIFFILVFTVIQYQPITYNHY | |
| | QYPGWAVAIGFLMALSSVLCIPLYAMFRLCRTDGDTLLQRLKNATK | |
| | PSRDWGPALLEHRTGRYAPTIAPSPEDGFEVQPLHPDKAQIPIVGSN | |
| | GSSRLQDSRI | |
| 333 | MEPSSKKLTGRLMLAVGGAVLGSLQFGYNTGVINAPQKVIEEFYNQ | SLC2A1 |
| | TWVHRYGESILPTTLTTLWSLSVAIFSVGGMIGSFSVGLFVNRFGRR | |
| | NSMLMMNLLAFVSAVLMGFSKLGKSFEMLILGRFIIGVYCGLTTGF | |
| | VPMYVGEVSPTALRGALGTLHQLGIVVGILIAQVFGLDSIMGNKDL | |
| | WPLLLSIIFIPALLQCIVLPFCPESPRFLLINRNEENRAKSVLKKLRGT | |
| | ADVTHDLQEMKEESRQMMREKKVTILELFRSPAYRQPILIAVVLQL | |
| | SQQLSGINAVFYYSTSIFEKAGVQQPVYATIGSGIVNTAFTVVSLFVV | |
| | ERAGRRTLHLIGLAGMAGCAILMTIALALLEQLPWMSYLSIVAIFGF | |
| | VAFFEVGPGPIPWFIVAELFSQGPRPAAIAVAGFSNWTSNFIVGMCF | |
| | QYVEQLCGPYVFIIFTVLLVLFFIFTYFKVPETKGRTFDEIASGFRQG | |
| | GASQSDKTPE | |
| | ELFHPLGADSQV | |
| 334 | MDPSMGVNSVTISVEGMTCNSCVWTIEQQIGKVNGVHHIKVSLEEK | ATP7A |
| | NATIIYDPKLQTPKTLQEAIDDMGFDAVIHNPDPLPVLTDTLFLTVTA | |
| | SLTLPWDHIQSTLLKTKGVTDIKIYPQKRTVAVTIIPSIVNANQIKELV | |
| | PELSLDTGTLEKKSGACEDHSMAQAGEVVLKMKVEGMTCHSCTST | |
| | IEGKIGKLQGVQRIKVSLDNQEATIVYQPHLISVEEMKKQIEAMGFP | |
| | AFVKKQPKYLKLGAIDVERLKNTPVKSSEGSQQRSPSYTNDSTATFII | |
| | DGMHCKSCVSNIESTLSALQYVSSIVVSLENRSAIVKYNASSVTPESL | |
| | RKAIEAVSPGLYRVSITSEVESTSNSPSSSSLQKIPLNVVSQPLTQETV | |
| | INIDGMTCNSCVQSIEGVISKKPGVKSIRVSLANSNGTVEYDPLLTSP | |
| | ETLRGAIEDMGFDATLSDTNEPLVVIAQPSSEMPLLTSTNEFYTKGM | |
| | TPVQD | |
| | KEEGKNSSKCYIQVTGMTCASCVANIERNLRREEGIYSILVALMAG | |
| | KAEVRYNPAVIQPPMIAEFIRELGFGATVIENADEGDGVLELVVRG | |
| | MTCASCVHKIESSLTKHRGILYCSVALATNKAHIKYDPEIIGPRDIIHT | |
| | IESLGFEASLVKKDRSASHLDHKREIRQWRRSFLVSLFFCIPVMGLMI | |
| | YMMVMDHHFATLHHNQNMSKEEMINLHSSMFLERQILPGLSVMNL | |
| | LSFLLC | |
| | VPVQFFGGWYFYIQAYKALKHKTANMDVLIVLATTIAFAYSLIILLV | |
| | AMYERAKVNPITFFDTPPMLFVFIALGRWLEHIAKGKTSEALAKLIS | |
| | LQATEATIVTLDSDNILLSEEQVDVELVQRGDIIKVVPGGKFPVDGR | |
| | VIEGHSMVDESLITGEAMPVAKKPGSTVIAGSINQNGSLLICATHVG | |
| | ADTTLSQIVKLVEEAQTSKAPIQQFADKLSGYFVPFIVFVSIATLLVW | |
| | IVIG | |
| | FLNFEIVETYFPGYNRSISRTETIIRFAFQASITVLCIACPCSLGLATPT | |
| | AVMVGTGVGAQNGILIKGGEPLEMAHKVKVVVFDKTGTITHGTPV | |
| | VNQVKVLTESNRISHHKILAIVGTAESNSEHPLGTAITKYCKQELDTE | |
| | TLGTCIDFQVVPGCGISCKVTNIEGLLHKNNWNIEDNNIKNASLVQI | |
| | DASNEQSSTSSSMIIDAQISNALNAQQYKVLIGNREWMIRNGLVINN | |
| | DVN | |
| | DFMTEHERKGRTAVLVAVDDELCGLIAIADTVKPEAELAIHILKSMG | |
| | LEVVLMTGDNSKTARSIASQVGITKVFAEVLPSHKVAKVKQLQEEG | |
| | KRVAMVGDGINDSPALAMANVGIAIGTGTDVAIEAADVVLIRNDLL | |
| | DVVASIDLSRKTVKRIRINFVFALIYNLVGIPIAAGVFMPIGLVLQPW | |
| | MGSAAMAASSVSVVLSSLFLKLYRKPTYESYELPARSQIGQKSPSEI | |
| | SVHVGIDDTSRNSPKLGLLDRIVNYSRASINSLLSDKRSLNSVVTSEP | |
| | DKHSLLVGDFREDDDTAL | |
| 335 | MMRFMLLFSRQGKLRLQKWYLATSDKERKKMVRELMQVVLARKP | AP1S1 |
| | KMCSFLEWRDLKVVYKRYASLYFCCAIEGQDNELITLELIHRYVEL | |
| | LDKYFGSVCELDIIFNFEKAYFILDEFLMGGDVQDTSKKSVLKAIEQ | |
| | ADLLQEEDESPRSVLEEMGLA | |
| 336 | MKILILGIFLFLCSTPAWAKEKHYYIGIIETTWDYASDHGEKKLISVD | CP |
| | TEHSNIYLQNGPDRIGRLYKKALYLQYTDETFRTTIEKPVWLGFLGPI | |
| | IKAETGDKVYVHLKNLASRPYTFHSHGITYYKEHEGAIYPDNTTDF | |
| | QRADDKVYPGEQYTYMLLATEEQSPGEGDGNCVTRIYHSHIDAPK | |
| | DIASGLIGPLIICKKDSLDKEKEKHIDREFVVMFSVVDENFSWYLED | |
| | NIKTYC | |
| | SEPEKVDKDNEDFQESNRMYSVNGYTFGSLPGLSMCAEDRVKWYL | |
| | FGMGNEVDVHAAFFHGQALTNKNYRIDTINLFPATLFDAYMVAQN | |
| | PGEWMLSCQNLNHLKAGLQAFFQVQECNKSSSKDNIRGKHVRHYY | |
| | IAAEEIIWNYAPSGIDIFTKENLTAPGSDSAVFFEQGTTRIGGSYKKL | |
| | VYREYTDASFTNRKERGPEEEHLGILGPVIWAEVGDTIRVTFHNKG | |
| | AYPLSIEPIGVRFNKNNEGTYYSPNYNPQSRSVPPSASHVAPTETFTY | |
| | EWTVPKEVGPTNADPVCLAKMYY | |
| | SAVDPTKDIFTGLIGPMKICKKGSLHANGRQKDVDKEFYLFPTVFDE | |
| | NESLLLEDNIRMFTTAPDQVDKEDEDFQESNKMHSMNGFMYGNQP | |
| | GLTMCKGDSVVWYLFSAGNEADVHGIYFSGNTYLWRGERRDTAN | |
| | LFPQTSLTLHMWPDTEGTFNVECLTTDHYTGGMKQKYTVNQCRRQ | |
| | SEDSTFYLGERTYYIAAVEVEWDYSPQREWEKELHHLQEQNVSNAF | |
| | LDKGEFYIGSKYKKVVYRQYTDSTFRVPVERKAEEEHLGILGPQLH | |
| | ADVGDKVKIIFKNMATRPYSIHAHGVQTESSTVTPTLPGETLTYVW | |
| | KIPERSGAGTEDSACIPWAYYSTVDQVKDLYSGLIGPLIVCRRPYLK | |
| | VFNPRRKLEFALLFLVFDENESWYLDDNIKTYSDHPEKVNKDDEEFI | |
| | ESNKMHAINGRMFGNLQGLTMHVGDEVNWYLMGMGNEIDLHTV | |
| | HFHGHSFQYKHRGVYSSDVFDIFPGTYQTLEMFPRTPGIWLLHCHV | |
| | TDHIHAGMETTYTVLQNEDTKSG | |
| 337 | MSPTISHKDSSRQRRPGNFSHSLDMKSGPLPPGGWDDSHLDSAGRE | SLC33A1 |
| | GDREALLGDTGTGDFLKAPQSFRAELSSILLLLFLYVLQGIPLGLAGS | |
| | IPLILQSKNVSYTDQAFFSFVFWPFSLKLLWAPLVDAVYVKNFGRRK | |
| | SWLVPTQYILGLFMIYLSTQVDRLLGNTDDRTPDVIALTVAFFLFEF | |
| | LAATQDIAVDGWALTMLSRENVGYASTCNSVGQTAGYFLGNVLFL | |
| | ALESADFCNKYLRFQPQPRGIVTLSDFLFFWGTVFLITTTLVALLKK | |
| | ENEVSVVKEETQGITDTYKL | |
| | LFAIIKMPAVLTFCLLILTAKIGFSAADAVTGLKLVEEGVPKEHLALL | |
| | AVPMVPLQIILPLIISKYTAGPQPLNTFYKAMPYRLLLGLEYALLVW | |
| | WTPKVEHQGGFPIYYYIVVLLSYALHQVTVYSMYVSIMAFNAKVS | |
| | DPLIGGTYMTLLNTVSNLGGNWPSTVALWLVDPLTVKECVGASNQ | |
| | NCRTPDAVELCKKLGGSCVTALDGYYVESIICVFIGFGWWFFLGPKF | |
| | KKLQDEGSSSWKCKRNN | |
| 338 | MSAVCGGAARMLRTPGRHGYAAEFSPYLPGRLACATAQHYGIAGC | PEX7 |
| | GTLLILDPDEAGLRLFRSFDWNDGLFDVTWSENNEHVLITCSGDGSL | |
| | QLWDTAKAAGPLQVYKEHAQEVYSVDWSQTRGEQLVVSGSWDQT | |
| | VKLWDPTVGKSLCTFRGHESIIYSTIWSPHIPGCFASASGDQTLRIWD | |
| | VKAAGVRIVIPAHQAEILSCDWCKYNENLLVTGAVDCSLRGWDLR | |
| | NVRQPVFELLGHTYAIRRVKFSPFHASVLASCSYDFTVRFWNFSKPD | |
| | SLLETVEHHTEFTCGLDFSLQSPTQVADCSWDETIKIYDPACLTIPA | |
| 339 | MEQLRAAARLQIVLGHLGRPSAGAVVAHPTSGTISSASFHPQQFQY | PHYH |
| | TLDNNVLTLEQRKFYEENGFLVIKNLVPDADIQRFRNEFEKICRKEV | |
| | KPLGLTVMRDVTISKSEYAPSEKMITKVQDFQEDKELFRYCTLPEIL | |
| | KYVECFTGPNIMAMHTMLINKPPDSGKKTSRHPLHQDLHYFPFRPS | |
| | DLIVCAWTAMEHISRNNGCLVVLPGTHKGSLKPHDYPKWEGGVNK | |
| | MFHGIQDYEENKARVHLVMEKGDTVFFHPLLIHGSGQNKTQGFRK | |
| | AISCHFASADCHYIDVKGTSQENIEKEVVGIAHKFFGAENSVNLKDI | |
| | WMFRARLVKGERTNL | |
| 340 | MAEAAAAAGGTGLGAGASYGSAADRDRDPDPDRAGRRLRVLSGH | AGPS |
| | LLGRPREALSTNECKARRAASAATAAPTATPAAQESGTIPKKRQEV | |
| | MKWNGWGYNDSKFIFNKKGQIELTGKRYPLSGMGLPTFKEWIQNT | |
| | LGVNVEHKTTSKASLNPSDTPPSVVNEDFLHDLKETNISYSQEADDR | |
| | VFRAHGHCLHEIFLLREGMFERIPDIVLWPTCHDDVVKIVNLACKY | |
| | NLCIIPIGGGTSVSYGLMCPADETRTIISLDTSQMNRILWVDENNLTA | |
| | HVEAGITGQELERQLKESGYCTGH | |
| | EPDSLEFSTVGGWVSTRASGMKKNIYGNIEDLVVHIKMVTPRGIIEK | |
| | SCQGPRMSTGPDIHHFIMGSEGTLGVITEATIKIRPVPEYQKYGSVAF | |
| | PNFEQGVACLREIAKQRCAPASIRLMDNKQFQFGHALKPQVSSIFTS | |
| | FLDGLKKFYITKFKGFDPNQLSVATLLFEGDREKVLQHEKQVYDIA | |
| | AKFGGLAAGEDNGQRGYLLTYVIAYIRDLALEYYVLGESFETSAPW | |
| | DRVVDLCRNVKERITRECKEKGVQFAPFSTCRVTQTYDAGACIYFY | |
| | FAFNYRGISDPLTVFEQTEAAAREEILANGGSLSHHHGVGKLRKQW | |
| | LKESISDVGFGMLKSVKEYVDPNNIFGNRNLL | |
| 341 | MESSSSSNSYFSVGPTSPSAVVLLYSKELKKWDEFEDILEERRHVSD | GNPAT |
| | LKFAMKCYTPLVYKGITPCKPIDIKCSVLNSEEIHYVIKQLSKESLQS | |
| | VDVLREEVSEILDEMSHKLRLGAIRFCAFTLSKVFKQIFSKVCVNEE | |
| | GIQKLQRAIQEHPVVLLPSHRSYIDFLMLSFLLYNYDLPVPVIAAGM | |
| | DFLGMKMVGELLRMSGAFFMRRTFGGNKLYWAVFSEYVKTMLRN | |
| | GYAPVEFFLEGTRSRSAKTLTPKFGLLNIVMEPFFKREVFDTYLVPIS | |
| | ISYDKILEETLYVYELLGVPKPKESTTGLLKARKILSENFGSIHVYFG | |
| | DPVSLRSLAAGRMSRSSYNLVPRYIPQKQSEDMHAFVTEVAYKMEL | |
| | LQIENMVLSPWTLIVAVLLQNRPSMDFDALVEKTLWLKGLTQAFGG | |
| | FLIWPDNKPAEEVVPASILLHSNIASLVKDQVILKVDSGDSEVVDGL | |
| | MLQHITLLMCSAYRNQLLNIFVRPSLVAVALQMTPGFRKEDVYSCF | |
| | RFLRDVFADEFIFLPGNTLKDFEEGCYLLCKSEAIQVTTKDILVTEKG | |
| | NTVLEFLVGLFKPFVESYQIICKYLLSEEEDHFSEEQYLAAVRKFTSQ | |
| | LLDQGTSQCYDVLSSDVQKNALAACVRLGVVEKKKINNNCIFNVN | |
| | EPATTKLEEMLGCKTPIGKPATAKL | |
| 342 | MPVLSRPRPWRGNTLKRTAVLLALAAYGAHKVYPLVRQCLAPARG | ABCD1 |
| | LQAPAGEPTQEASGVAAAKAGMNRVFLQRLLWLLRLLFPRVLCRE | |
| | TGLLALHSAALVSRTFLSVYVARLDGRLARCIVRKDPRAFGWQLLQ | |
| | WLLIALPATFVNSAIRYLEGQLALSFRSRLVAHAYRLYFSQQTYYRV | |
| | SNMDGRLRNPDQSLTEDVVAFAASVAHLYSNLTKPLLDVAVTSYT | |
| | LLRAARSRGAGTAWPSAIAGLVVFLTANVLRAFSPKFGELVAEEAR | |
| | RKGELRYMHSRVVANSEEIAFYGGHEVELALLQRSYQDLASQINLIL | |
| | LERLWYVMLEQFLMKYVWSASGLLMVAVPIITATGYSESDAEAVK | |
| | KAALEKKEEELVSERTEAFTIARNLLTAAADAIERIMSSYKEVTELA | |
| | GYTARVHEMFQVFEDVQRCHFKRPRELEDAQAGSGTIGRSGVRVE | |
| | GPLKIRGQVVDVEQGIICENIPIVTPSGEVVVASLNIRVEEGMHLLITG | |
| | PNGCGKSSLFRILGGLWPTYGGVLYKPPPQRMFYIPQRPYMSVGSL | |
| | RDQVIYPDSVEDMQRKGYSEQDLEAILDVVHLHHILQREGGWEAM | |
| | CD | |
| | WKDVLSGGEKQRIGMARMFYHRPKYALLDECTSAVSIDVEGKIFQ | |
| | AAKDAGIALLSITHRPSLWKYHTHLLQFDGEGGWKFEKLDSAARLS | |
| | LTEEKQRLEQQLAGIPKMQRRLQELCQILGEAVAPAHVPAPSPQGP | |
| | GGLQGAST | |
| 343 | MNPDLRRERDSASFNPELLTHILDGSPEKTRRRREIENMILNDPDFQ | ACOX1 |
| | HEDLNFLTRSQRYEVAVRKSAIMVKKMREFGIADPDEIMWFKKLHL | |
| | VNFVEPVGLNYSMFIPTLLNQGTTAQKEKWLLSSKGLQIIGTYAQTE | |
| | MGHGTHLRGLETTATYDPETQEFILNSPTVTSIKWWPGGLGKTSNH | |
| | AIVLAQLITKGKCYGLHAFIVPIREIGTHKPLPGITVGDIGPKFGYDEI | |
| | DNGYLKMDNHRIPRENMLMKYAQVKPDGTYVKPLSNKLTYGTMV | |
| | FVRSFLVGEAARALSKACTIAIRYSAVRHQSEIKPGEPEPQILDFQTQ | |
| | QYKLFPLLATAYAFQFVGAYMKETYHRINEGIGQGDLSELPELHAL | |
| | TAGLKAFTSWTANTGIEACRMACGGHGYSHCSGLPNIYVNFTPSCT | |
| | FEGENTVMMLQTARFLMKSYDQVHSGKLVCGMVSYLNDLPSQRIQ | |
| | PQQVAVWPTMVDINSPESLTEAYKLRAARLVEIAAKNLQKEVIHRK | |
| | SKEVAWNLTSVDLVRASEAHCHYVVVKLFSEKLLKIQDKAIQAVLR | |
| | SLCLLYSLYGISQNAGDFLQGSIMTEPQITQVNQRVKELLTLIRSDAV | |
| | ALVDAFDFQDVTLGSVLGRYDGNVYENLFEWAKNSPLNKAEVHES | |
| | YKHLKSLQSKL | |
| 344 | MWGSDRLAGAGGGGAAVTVAFTNARDCFLHLPRRLVAQLHLLQN | PEX1 |
| | QAIEVVWSHQPAFLSWVEGRHFSDQGENVAEINRQVGQKLGLSNG | |
| | GQVFLKPCSHVVSCQQVEVEPLSADDWEILELHAVSLEQHLLDQIRI | |
| | VFPKAIFPVWVDQQTYIFIQIVALIPAASYGRLETDTKLLIQPKTRRA | |
| | KENTFSKADAEYKKLHSYGRDQKGMMKELQTKQLQSNTVGITESN | |
| | ENESEIPVDSSSVASLWTMIGSIFSFQSEKKQETSWGLTEINAFKNMQ | |
| | SKVVPLDNIFRVCKSQPPSIYNASATSVFHKHCAIHVFPWDQEYFDV | |
| | EPSFTVTYGKLVKLLSPKQQQSKTKQNVLSPEKEKQMSEPLDQKKI | |
| | RSDHNEEDEKACVLQVVWNGLEELNNAIKYTKNVEVLHLGKVWIP | |
| | DDLRKRLNIEMHAVVRITPVEVTPKIPRSLKLQPRENLPKDISEEDIK | |
| | TVFYSWLQQSTTTMLPLVISEEEFIKLETKDGLKEFSLSIVHSWEKEK | |
| | DKNIFLLSPNLLQKTTIQVLLDPMVKEEN | |
| | SEEIDFILPFLKLSSLGGVNSLGVSSLEHITHSLLGRPLSRQLMSLVAG | |
| | LRNGALLLTGGKGSGKSTLAKAICKEAFDKLDAHVERVDCKALRG | |
| | KRLENIQKTLEVAFSEAVWMQPSVVLLDDLDLIAGLPAVPEHEHSP | |
| | DAVQSQRLAHALNDMIKEFISMGSLVALIATSQSQQSLHPLLVSAQG | |
| | VHIFQCVQHIQPPNQEQRCEILCNVIKNKLDCDINKFTDLDLQHVAK | |
| | ETGGFVARDFTVLVDRAIHSRLSRQSISTREKLVLTTLDFQKALRGF | |
| | LPASLRSVNLHKPRDLGWDKIGGLHEVRQILMDTIQLPAKYPELFA | |
| | NLPIRQRTGILLYGPPGTGKTLLAGVIARESRMNFISVKGPELLSKYI | |
| | GASEQAVRDIFIRAQAAKPCILFFDEFESIAPRRGHDNTGVTDRVVN | |
| | QLLTQLDGVEGLQGVYVLAATSRPDLIDPALLRPGRLDKCVYCPPP | |
| | DQVSRLEILNVLSDSLPLADDVDLQHVASVTDSFTGADLKALLYNA | |
| | QLEALHGMLLSSGLQDGSSSSDSDLSLSSMVFLNHSSGSDDSAGDG | |
| | ECGLDQSLVSLEMSEILPDESKFNMYRLYFGSSYESELGNGTSSDLS | |
| | SQCLSAPSSMTQDLPGVPGKDQLFSQPPVLRTASQEGCQELTQEQR | |
| | DQLRADISIIKGRYRSQSGEDESMNQPGPIKTRLAISQSHLMTALGHT | |
| | RPSISEDDWKNFAELYESFQNPKRRKNQSGTMFRPGQKVTLA | |
| 345 | MASRKENAKSANRVLRISQLDALELNKALEQLVWSQFTQCFHGFKP | PEX2 |
| | GLLARFEPEVKACLWVFLWRFTIYSKNATVGQSVLNIKYKNDFSPN | |
| | LRYQPPSKNQKIWYAVCTIGGRWLEERCYDLFRNHHLASFGKVKQ | |
| | CVNFVIGLLKLGGLINFLIFLQRGKFATLTERLLGIHSVFCKPQNICEV | |
| | GFEYMNRELLWHGFAEFLIFLLPLINVQKLKAKLSSWCIPLTGAPNS | |
| | DNTLATSGKECALCGEWPTMPHTIGCEHIFCYFCAKSSFLFDVYFTC | |
| | PKCGTEVHSLQPLKSGIEMSEVNAL | |
| 346 | MLRSVWNFLKRHKKKCIFLGTVLGGVYILGKYGQKKIREIQEREAA | PEX3 |
| | EYIAQARRQYHFESNQRTCNMTVLSMLPTLREALMQQLNSESLTAL | |
| | LKNRPSNKLEIWEDLKIISFTRSTVAVYSTCMLVVLLRVQLNIIGGYI | |
| | YLDNAAVGKNGTTILAPPDVQQQYLSSIQHLLGDGLTELITVIKQAV | |
| | QKVLGSVSLKHSLSLLDLEQKLKEIRNLVEQHKSSSWINKDGSKPLL | |
| | CHYMMPDEETPLAVQACGLSPRDITTIKLLNETRDMLESPDFSTVLN | |
| | TCLNRGFSRLLDNMAEFFRPTEQDLQHGNSMNSLSSVSLPLAKIIPIV | |
| | NGQIHSVCSETPSHFVQDLLTMEQVKDFAANVYEAFSTPQQLEK | |
| 347 | MAMRELVEAECGGANPLMKLAGHFTQDKALRQEGLRPGPWPPGA | PEX5 |
| | PASEAASKPLGVASEDELVAEFLQDQNAPLVSRAPQTFKMDDLLAE | |
| | MQQIEQSNFRQAPQRAPGVADLALSENWAQEFLAAGDAVDVTQD | |
| | YNETDWSQEFISEVTDPLSVSPARWAEEYLEQSEEKLWLGEPEGTA | |
| | TDRWYDEYHPEEDLQHTASDFVAKVDDPKLANSEFLKFVRQIGEG | |
| | QVSLESGAGSGRAQAEQWAAEFIQQQGTSDAWVDQFTRPVNTSAL | |
| | DMEFERAKSAIESDVDFWDKLQAELEEMAKRDAEAHPWLSDYDDL | |
| | TSATYDKGYQFEEENPLRDHPQPFEEGLRRLQEGDLPNAVLLFEAA | |
| | VQQDPKHMEAWQYLGTTQAENEQELLAISALRRCLELKPDNQTAL | |
| | MALAVSFTNESLQRQACETLRDWLRYTPAYAHLVTPAEEGAGGAG | |
| | LGPSKRILGSLLSDSLFLEVKELFLAAVRLDPTSIDPDVQCGLGVLFN | |
| | LSGEYDKAVDCFTAALSVRPNDYLLWNKLGATLANGNQSEEAVAA | |
| | YRRALELQPGYIRSRYNLGISCINLGAHREAVEHFLEALNMQRKSRG | |
| | PRGEGGAMSENIWSTLRLALSMLGQSDAYGAADARDLSTLLTMFG | |
| | LPQ | |
| 348 | MALAVLRVLEPFPTETPPLAVLLPPGGPWPAAELGLVLALRPAGESP | PEX6 |
| | AGPALLVAALEGPDAGTEEQGPGPPQLLVSRALLRLLALGSGAWVR | |
| | ARAVRRPPALGWALLGTSLGPGLGPRVGPLLVRRGETLPVPGPRVL | |
| | ETRPALQGLLGPGTRLAVTELRGRARLCPESGDSSRPPPPPVVSSFA | |
| | VSGTVRRLQGVLGGTGDSLGVSRSCLRGLGLFQGEWVWVAQARES | |
| | SNTSQPHLARVQVLEPRWDLSDRLGPGSGPLGEPLADGLALVPATL | |
| | AFNLGCDPLEMGELRIQRYLEGS | |
| | IAPEDKGSCSLLPGPPFARELHIEIVSSPHYSTNGNYDGVLYRHFQIPR | |
| | VVQEGDVLCVPTIGQVEILEGSPEKLPRWREMFFKVKKTVGEAPDG | |
| | PASAYLADTTHTSLYMVGSTLSPVPWLPSEESTLWSSLSPPGLEALV | |
| | SELCAVLKPRLQPGGALLTGTSSVLLRGPPGCGKTTVVAAACSHLG | |
| | LHLLKVPCSSLCAESSGAVETKLQAIFSRARRCRPAVLLLTAVDLLG | |
| | RDRDGLGEDARVMAVLRHLLLNEDPLNSCPPLMVVATTSRAQDLP | |
| | ADVQTAFPHELEVPALSEGQRLSILRALTAHLPLGQEVNLAQLARR | |
| | CAGFVVGDLYALLTHSSRAACTRIKNSGLAGGLTEEDEGELCAAGF | |
| | PLLAEDFGQALEQLQTAHSQAVGAPKIPSVSWHDVGGLQEVKKEIL | |
| | ETIQLPLEHPELLSLGLRRSGLLLHGPPGTGKTLLAKAVATECSLTFL | |
| | SVKGPELINMYVGQSEENVREVFARARAAAPCIIFFDELDSLAPSRG | |
| | RSGDSGGVMDRVVSQLLAELDGLHSTQ | |
| | DVFVIGATNRPDLLDPALLRPGRFDKLVFVGANEDRASQLRVLSAIT | |
| | RKFKLEPSVSLVNVLDCCPPQLTGADLYSLCSDAMTAALKRRVHDL | |
| | EEGLEPGSSALMLTMEDLLQAAARLQPSVSEQELLRYKRIQRKFAA | |
| | C | |
| 349 | MAPAAASPPEVIRAAQKDEYYRGGLRSAAGGALHSLAGARKWLE | PEX10 |
| | WRKEVELLSDVAYFGLTTLAGYQTLGEEYVSIIQVDPSRIHVPSSLR | |
| | RGVLVTLHAVLPYLLDKALLPLEQELQADPDSGRPLQGSLGPGGRG | |
| | CSGARRWMRHHTATLTEQQRRALLRAVFVLRQGLACLQRLHVAW | |
| | FYIHGVFYHLAKRLTGITYLRVRSLPGEDLRARVSYRLLGVISLLHL | |
| | VLSMGLQLYGFRQRQRARKEWRLHRGLSHRRASLEERAVSRNPLC | |
| | TLCLEERRHPTATPCGHLFCWECITAW | |
| | CSSKAECPLCREKFPPQKLIYLRHYR | |
| 350 | MAEHGAHFTAASVADDQPSIFEVVAQDSLMTAVRPALQHVVKVLA | PEX12 |
| | ESNPTHYGFLWRWFDEIFTLLDLLLQQHYLSRTSASFSENFYGLKRI | |
| | VMGDTHKSQRLASAGLPKQQLWKSIMFLVLLPYLKVKLEKLVSSL | |
| | REEDEYSIHPPSSRWKRFYRAFLAAYPFVNMAWEGWFLVQQLRYIL | |
| | GKAQHHSPLLRLAGVQLGRLTVQDIQALEHKPAKASMMQQPARSV | |
| | SEKINSALKKAVGGVALSLSTGLSVGVFFLQFLDWWYSSENQETIKS | |
| | LTALPTPPPPVHLDYNSDSPLLPKMKTVCPLCRKTRVNDTVLATSG | |
| | YVFCYRCVFHYVRSHQACPITGYPTEVQHLIKLYSPEN | |
| 351 | MASQPPPPPKPWETRRIPGAGPGPGPGPTFQSADLGPTLMTRPGQPA | PEX13 |
| | LTRVPPPILPRPSQQTGSSSVNTFRPAYSSFSSGYGAYGNSFYGGYSP | |
| | YSYGYNGLGYNRLRVDDLPPSRFVQQAEESSRGAFQSIESIVHAFAS | |
| | VSMMMDATFSAVYNSFRAVLDVANHFSRLKIHFTKVFSAFALVRTI | |
| | RYLYRRLQRMLGLRRGSENEDLWAESEGTVACLGAEDRAATSAKS | |
| | WPIFLFFAVILGGPYLIWKLLSTHSDEVTDSINWASGEDDHVVARAE | |
| | YDFAAVSEEEISFRAGDMLNLALKEQQPKVRGWLLASLDGQTTGLI | |
| | PANYVKILGKRKGRKTVESSKVSKQQQSFTNPTLTKGATVADSLDE | |
| | QEAAFESVFVETNKVPVAPDSIGKDGEKQDL | |
| 352 | MASSEQAEQPSQPSSTPGSENVLPREPLIATAVKFLQNSRVRQSPLAT | PEX14 |
| | RRAFLKKKGLTDEEIDMAFQQSGTAADEPSSLGPATQVVPVQPPHLI | |
| | SQPYSPAGSRWRDYGALAIIMAGIAFGFHQLYKKYLLPLILGGREDR | |
| | KQLERMEAGLSELSGSVAQTVTQLQTTLASVQELLIQQQQKIQELA | |
| | HELAAAKATTSTNWILESQNINELKSEINSLKGLLLNRRQFPPSPSAP | |
| | KIPSWQIPVKSPSPSSPAAVNHHSSSDISPVSNESTSSSPGKEGHSPEG | |
| | STVTYHLLGPQEEGEGVVDVKGQVRMEVQGEEEKREDKEDEEDEE | |
| | DDDVSHVDEEDCLGVQREDRRGGDGQINEQVEKLRRPEGASNESE | |
| | RD | |
| 353 | MEKLRLLGLRYQEYVTRHPAATAQLETAVRGFSYLLAGRFADSHE | PEX16 |
| | LSELVYSASNLLVLLNDGILRKELRKKLPVSLSQQKLLTWLSVLECV | |
| | EVFMEMGAAKVWGEVGRWLVIALVQLAKAVLRMLLLLWFKAGL | |
| | QTSPPIVPLDRETQAQPPDGDHSPGNHEQSYVGKRSNRVVRTLQNT | |
| | PSLHSRHWGAPQQREGRQQQHHEELSATPTPLGLQETIAEFLYIARP | |
| | LLHLLSLGLWGQRSWKPWLLAGVVDVTSLSLLSDRKGLTRRERRE | |
| | LRRRTILLLYYLLRSPFYDRFSEARIL | |
| | FLLQLLADHVPGVGLVTRPLMDYLPTWQKIYFYSWG | |
| 354 | MAAAEEGCSVGAEADRELEELLESALDDFDKAKPSPAPPSTTTAPD | PEX19 |
| | ASGPQKRSPGDTAKDALFASQEKFFQELFDSELASQATAEFEKAMK | |
| | ELAEEEPHLVEQFQKLSEAAGRVGSDMTSQQEFTSCLKETLSGLAK | |
| | NATDLQNSSMSEEELTKAMEGLGMDEGDGEGNILPIMQSIMQNLLS | |
| | KDVLYPSLKEITEKYPEWLQSHRESLPPEQFEKYQEQHSVMCKICEQ | |
| | FEAETPTDSETTQKARFEMVLDLMQQLQDLGHPPKELAGEMPPGLN | |
| | FDLDALNLSGPPGASGEQCLIM | |
| 355 | MKSDSSTSAAPLRGLGGPLRSSEPVRAVPARAPAVDLLEEAADLLV | PEX26 |
| | VHLDFRAALETCERAWQSLANHAVAEEPAGTSLEVKCSLCVVGIQ | |
| | ALAEMDRWQEVLSWVLQYYQVPEKLPPKVLELCILLYSKMQEPGA | |
| | VLDVVGAWLQDPANQNLPEYGALAEFHVQRVLLPLGCLSEAEELV | |
| | VGSAAFGEERRLDVLQAIHTARQQQKQEHSGSEEAQKPNLEGSVSH | |
| | KFLSLPMLVRQLWDSAVSHFFSLPFKKSLLAALILCLLVVRFDPASP | |
| | SSLHFLYKLAQLFRWIRKAAFSRLYQ | |
| | LRIRD | |
| 356 | MALQGISVVELSGLAPGPFCAMVLADFGARVVRVDRPGSRYDVSR | AMACR |
| | LGRGKRSLVLDLKQPRGAAVLRRLCKRSDVLLEPFRRGVMEKLQL | |
| | GPEILQRENPRLIYARLSGFGQSGSFCRLAGHDINYLALSGVLSKIGR | |
| | SGENPYAPLNLLADFAGGGLMCALGIIMALFDRTRTGKGQVIDANM | |
| | VEGTAYLSSFLWKTQKLSLWEAPRGQNMLDGGAPFYTTYRTADGE | |
| | FMAVGAIEPQFYELLIKGLGLKSDELPNQMSMDDWPEMKKKFADV | |
| | FAEKTKAEWCQIFDGTDACVTPVLTFEEVVHHDHNKERGSFITSEE | |
| | QDVSPRPAPLLLNTPAIPSFKRDPFIGEHTEEILEEFGFSREEIYQLNSD | |
| | KIIESNKVKASL | |
| 357 | MAQTPAFDKPKVELHVHLDGSIKPETILYYGRRRGIALPANTAEGLL | ADA |
| | NVIGMDKPLTLPDFLAKFDYYMPAIAGCREAIKRIAYEFVEMKAKE | |
| | GVVYVEVRYSPHLLANSKVEPIPWNQAEGDLTPDEVVALVGQGLQ | |
| | EGERDFGVKARSILCCMRHQPNWSPKVVELCKKYQQQTVVAIDLA | |
| | GDETIPGSSLLPGHVQAYQEAVKSGIHRTVHAGEVGSAEVVKEAVD | |
| | ILKTERLGHGYHTLEDQALYNRLRQENMHFEICPWSSYLTGAWKPD | |
| | TEHAVIRLKNDQANYSLNTDDPLIF | |
| | KSTLDTDYQMTKRDMGFTEEEFKRLNINAAKSSFLPEDEKRELLDL | |
| | LYKAYGMPPSASAGQNL | |
| 358 | MAAGGDHGSPDSYRSPLASRYASPEMCFVFSDRYKFRTWRQLWL | ADSL |
| | WLAEAEQTLGLPITDEQIQEMKSNLENIDFKMAAEEEKRLRHDVMA | |
| | HVHTFGHCCPKAAGIIHLGATSCYVGDNTDLIILRNALDLLLPKLAR | |
| | VISRLADFAKERASLPTLGFTHFQPAQLTTVGKRCCLWIQDLCMDL | |
| | QNLKRVRDDLRFRGVKGTTGTQASFLQLFEGDDHKVEQLDKMVTE | |
| | KAGFKRAFIITGQTYTRKVDIEVLSVLASLGASVHKICTDIRLLANLK | |
| | EMEEPFEKQQIGSSAMPYKRNPMRSERCCSLARHLMTLVMDPLQT | |
| | ASVQWFERTLDDSANRRICLAEAFLTADTILNTLQNISEGLVVYPKV | |
| | IERRIRQELPFMATENIIMAMVKAGGSRQDCHEKIRVLSQQAASVVK | |
| | QEGGDNDLIERIQVDAYFSPIHSQLDHLLDPSSFTGRASQQVQRFLEE | |
| | EVYPLLKPYESVMKVKAELCL | |
| 359 | MNVRIFYSVSQSPHSLLSLLFYCAILESRISATMPLFKLPAEEKQIDD | AMPD1 |
| | AMRNFAEKVFASEVKDEGGRQEISPFDVDEICPISHHEMQAHIFHLE | |
| | TLSTSTEARRKKRFQGRKTVNLSIPLSETSSTKLSHIDEYISSSPTYQT | |
| | VPDFQRVQITGDYASGVTVEDFEIVCKGLYRALCIREKYMQKSFQR | |
| | FPKTPSKYLRNIDGEAWVANESFYPVFTPPVKKGEDPFRTDNLPENL | |
| | GYHLKMKDGVVYVYPNEAAVSKDEPKPLPYPNLDTFLDDMNFLLA | |
| | LIAQGPVKTYTHRRLKFLSSKFQVHQMLNEMDELKELKNNPHRDF | |
| | YNCRKVDTHIHAAACMNQKHLLRFIKKSYQIDADRVVYSTKEKNL | |
| | TLKELFAKLKMHPYDLTVDSLDVHAGRQTFQRFDKFNDKYNPVGA | |
| | SELRDLYLKTDNYINGEYFATIIKEVGADLVEAKYQHAEPRLSIYGR | |
| | SPDEWSKLSSWFVCNRIHCPNMTWMIQVPRIYDVFRSKNFLPHFGK | |
| | MLENIFMPVFEATINPQADPELSVFLKHIT | |
| | GFDSVDDESKHSGHMFSSKSPKPQEWTLEKNPSYTYYAYYMYANI | |
| | MVLNSLRKERGMNTFLFRPHCGEAGALTHLMTAFMIADDISHGLNL | |
| | KKSPVLQYLFFLAQIPIAMSPLSNNSLFLEYAKNPFLDFLQKGLMISL | |
| | STDDPMQFHFTKEPLMEEYAIAAQVFKLSTCDMCEVARNSVLQCGI | |
| | SHEEKVKFLGDNYLEEGPAGNDIRRTNVAQIRMAYRYETWCYELN | |
| | LIAEGLKSTE | |
| 360 | MATEGMILTNHDHQIRVGVLTVSDSCFRNLAEDRSGINLKDLVQDP | GPHN |
| | SLLGGTISAYKIVPDEIEEIKETLIDWCDEKELNLILTTGGTGFAPRDV | |
| | TPEATKEVIEREAPGMALAMLMGSLNVTPLGMLSRPVCGIRGKTLII | |
| | NLPGSKKGSQECFQFILPALPHAIDLLRDAIVKVKEVHDELEDLPSPP | |
| | PPLSPPPTTSPHKQTEDKGVQCEEEEEEKKDSGVASTEDSSSSHITAA | |
| | AIAAKIPDSIISRGVQVLPRDTASLSTTPSESPRAQATSRLSTASCPTP | |
| | KVQSRCSSKENILRASHSAVDITKVARRHRMSPFPLTSMDKAFITVL | |
| | EMTPVLGTEIINYRDGMGRVLAQDVYAKDNLPPFPASVKDGYAVR | |
| | AADGPGDRFIIGESQAGEQPTQTVMPGQVMRVTTGAPIPCGADAVV | |
| | QVEDTELIRESDDGTEELEVRILVQARPGQDIRPIGHDIKRGECVLAK | |
| | GTHMGPS | |
| | EIGLLATVGVTEVEVNKFPVVAVMSTGNELLNPEDDLLPGKIRDSN | |
| | RSTLLATIQEHGYPTINLGIVGDNPDDLLNALNEGISRADVIITSGGVS | |
| | MGEKDYLKQVLDIDLHAQIHFGRVFMKPGLPTTFATLDIDGVRKIIF | |
| | ALPGNPVSAVVTCNLFVVPALRKMQGILDPRPTIIKARLSCDVKLDP | |
| | RPEYHRCILTWHHQEPLPWAQSTGNQMSSRLMSMRSANGLLMLPP | |
| | KTEQYVELHKGEVVDVMVIGRL | |
| 361 | MAGAAAESGRELWTFAGSRDPSAPRLAYGYGPGSLRELRAREFSRL | MOCOS |
| | AGTVYLDHAGATLFSQSQLESFTSDLMENTYGNPHSQNISSKLTHD | |
| | TVEQVRYRILAHFHTTAEDYTVIFTAGSTAALKLVAEAFPWVSQGP | |
| | ESSGSRFCYLTDSHTSVVGMRNVTMAINVISTPVRPEDLWSAEERSA | |
| | SASNPDCQLPHLFCYPAQSNFSGVRYPLSWIEEVKSGRLHPVSTPGK | |
| | WFVLLDAASYVSTSPLDLSAHQADFVPISFYKIFGFPTGLGALLVHN | |
| | RAAPLLRKTYFGGGTASAYLAGEDFYIPRQSVAQRFEDGTISFLDVI | |
| | ALKHGFDTLERLTGGMENIKQHTFTLAQYTYVALSSLQYPNGAPVV | |
| | RIYSDSEFSSPEVQGPIINFNVLDDKGNIIGYSQVDKMASLYNIHLRT | |
| | GCFCNTGACQRHLGISNEMVRKHFQAGHVCGDNMDLIDGQPTGSV | |
| | RISFGYMSTLDDVQAFLRFIIDTRLHSSGDWPVPQAHADTGETGAPS | |
| | ADSQADVIPAVMGRRSLSPQEDALTGSRVWNNSSTVNAVPVAPPV | |
| | CDVARTQPTPSEKAAGVLEGALGPHVVTNLYLYPIKSCAAFEVTRW | |
| | PVGNQGLLYDRSWMVVNHNGVCLSQKQEPRLCLIQPFIDLRQRIMV | |
| | IKAKGMEPIEVPLEENSERTQIRQSRVCADRVSTYDCGEKISSWLSTF | |
| | FGRPCHLIKQSSNSQRNAKKKHGKDQLPGTMATLSLVNEAQYLLIN | |
| | TSSILELHRQLNTSDENGKEELFSLKDLSLRFRANIIINGKRAFEEEK | |
| | WDEISIGSLRFQVLGPCHRCQMICIDQQTGQRNQHVFQKLSESRETK | |
| | VNFGMYLMHASLDLSSPCFLSVGSQVLPVLKENVEGHDLPASEKHQ | |
| | DVTS | |
| 362 | MAARPLSRMLRRLLRSSARSCSSGAPVTQPCPGESARAASEEVSRRR | MOCS1 |
| | QFLREHAAPFSAFLTDSFGRQHSYLRISLTEKCNLRCQYCMPEEGVP | |
| | LTPKANLLTTEEILTLARLFVKEGIDKIRLTGGEPLIRPDVVDIVAQLQ | |
| | RLEGLRTIGVTTNGINLARLLPQLQKAGLSAINISLDTLVPAKFEFIVR | |
| | RKGFHKVMEGIHKAIELGYNPVKVNCVVMRGLNEDELLDFAALTE | |
| | GLP | |
| | LDVRFIEYMPFDGNKWNFKKMVSYKEMLDTVRQQWPELEKVPEEE | |
| | SSTAKAFKIPGFQGQISFITSMSEHFCGTCNRLRITADGNLKVCLFGN | |
| | SEVSLRDHLRAGASEQELLRIIGAAVGRKKRQHAGMFSISQMKNRP | |
| | MILIELFLMFPNSPPANPSIFSWDPLHVQGLRPRMSFSSQVATLWKG | |
| | CRVPQTPPLAQQRLGSGSFQRHYTSRADSDANSKCLSPGSWASAAP | |
| | SGPQLTSEQLTHVDSEGRAAMVDVGRKPDTERVAVASAVVLLGPV | |
| | AFKLVQQNQLKKGDALVVAQLAG | |
| | VQAAKVTSQLIPLCHHVALSHIQVQLELDSTRHAVKIQASCRARGPT | |
| | GVEMEALTSAAVAALTLYDMCKAVSRDIVLEEIKLISKTGGQRGDF | |
| | HRA | |
| 363 | MENGYTYEDYKNTAEWLLSHTKHRPQVAIICGSGLGGLTDKLTQA | PNP |
| | QIFDYGEIPNFPRSTVPGHAGRLVFGFLNGRACVMMQGRFHMYEG | |
| | YPLWKVTFPVRVFHLLGVDTLVVTNAAGGLNPKFEVGDIMLIRDHI | |
| | NLPGFSGQNPLRGPNDERFGDRFPAMSDAYDRTMRQRALSTWKQM | |
| | GEQRELQEGTYVMVAGPSFETVAECRVLQKLGADAVGMSTVPEVI | |
| | VARHCGLRVFGFSLITNKVIMDYESLEKANHEEVLAAGKQAAQKLE | |
| | QFVSILMASIPLPDKAS | |
| 364 | MTADKLVFFVNGRKVVEKNADPETTLLAYLRRKLGLSGTKLGCGE | XDH |
| | GGCGACTVMLSKYDRLQNKIVHFSANACLAPICSLHHVAVTTVEGI | |
| | GSTKTRLHPVQERIAKSHGSQCGFCTPGIVMSMYTLLRNQPEPTMEE | |
| | IENAFQGNLCRCTGYRPILQGFRTFARDGGCCGGDGNNPNCCMNQ | |
| | KKDHSVSLSPSLFKPEEFTPLDPTQEPIFPPELLRLKDTPRKQLRFEGE | |
| | RVTWIQASTLKELLDLKAQHPDAKLVVGNTEIGIEMKFKNMLFPMI | |
| | VCPAWIPELNSVEHGPDGISFGAACPLSIVEKTLVDAVAKLPAQKTE | |
| | VFRGVLEQLRWFAGKQVKSVASVGGNIITASPISDLNPVFMASGAK | |
| | LTLVSRGTRRTVQMDHTFFPGYRKTLLSPEEILLSIEIPYSREGEYFSA | |
| | FKQASRREDDIAKVTSGMRVLFKPGTTEVQELALCYGGMANRTISA | |
| | LKTTQRQLSKLWKEELLQDVCAGLAEELHLPPDAPGGMVDFRCTL | |
| | TLSFFFKFYLTVLQKLGQENLEDKCGKLDPTFASATLLFQKDPPADV | |
| | QLFQEVPKGQSEEDMVGRPLPHLAADMQASGEAVYCDDIPRYENE | |
| | LSLRLVTSTRAHAKIKSIDTSEAKKVPGFVCFISADDVPGSNITGICN | |
| | DETVFAKDKVTCVGHIIGAVVADTPEHTQRAAQGVKITYEELPAIITI | |
| | EDAIKNNSFYGPELKIEKGDLKKGFSEADNVVSGEIYIGGQEHFYLE | |
| | THCTIAVPKGEAGEMELFVSTQNTMKTQSFVAKMLGVPANRIVVR | |
| | VKRMGGGFGGKETRSTVVSTAVALAAYKTGRPVRCMLDRDEDML | |
| | ITGGR | |
| | HPFLARYKVGFMKTGTVVALEVDHFSNVGNTQDLSQSIMERALFH | |
| | MDNCYKIPNIRGTGRLCKTNLPSNTAFRGFGGPQGMLIAECWMSEV | |
| | AVTCGMPAEEVRRKNLYKEGDLTHFNQKLEGFTLPRCWEECLASS | |
| | QYHARKSEVDKFNKENCWKKRGLCIIPTKFGISFTVPFLNQAGALLH | |
| | VYTDGSVLLTHGGTEMGQGLHTKMVQVASRALKIPTSKIYISETST | |
| | NTVPNTSPTAASVSADLNGQAVYAACQTILKRLEPYKKKNPSGSWE | |
| | DWVTAAYMDTVSLSATGFYRTPNLGYSFETNSGNPFHYFSYGVAC | |
| | SEVEIDCLTGDHKNLRTDIVMDVGSSLNPAIDIGQVEGAFVQGLGLF | |
| | TLEELHYSPEGSLHTRGPSTYKIPAFGSIPIEFRVSLLRDCPNKKAIYA | |
| | SKAVGEPPLFLAASIFFAIKDAIRAARAQHTGNNVKELFRLDSPATPE | |
| | KIRNACVDKFTTLCVTGVPENCKPWSVRV | |
| 365 | MLLLHRAVVLRLQQACRLKSIPSRICIQACSTNDSFQPQRPSLTFSGD | SUOX |
| | NSSTQGWRVMGTLLGLGAVLAYQDHRCRAAQESTHIYTKEEVSSH | |
| | TSPETGIWVTLGSEVFDVTEFVDLHPGGPSKLMLAAGGPLEPFWAL | |
| | YAVHNQSHVRELLAQYKIGELNPEDKVAPTVETSDPYADDPVRHPA | |
| | LKVNSQRPFNAEPPPELLTENYITPNPIFFTRNHLPVPNLDPDTYRLH | |
| | VVGAPGGQSLSLSLDDLHNFPRYEITVTLQCAGNRRSEMTQVKEVK | |
| | GLEWRTGAISTARWAGARLCDVLAQAGHQLCETEAHVCFEGLDSD | |
| | PTGTAYGASIPLARAMDPEAEVLLAYEMNGQPLPRDHGFPVRVVVP | |
| | GVVGARHVKWLGRVSVQPEESYSHWQRRDYKGFSPSVDWETVDF | |
| | DSAPSIQELPVQSAITEPRDGETVESGEVTIKGYAWSGGGRAVIRVD | |
| | VSLDGGLTWQVAKLDGEEQRPRKAWAWRLWQLKAPVPAGQKEL | |
| | NIVCKAVDDGYNVQPDTVAPIWNLRGVLSNAWHRVHVYVSP | |
| 366 | MFHLRTCAAKLRPLTASQTVKTFSQNRPAAARTFQQIRCYSAPVAA | OGDH |
| | EPFLSGTSSNYVEEMYCAWLENPKSVHKSWDIFFRNTNAGAPPGTA | |
| | YQSPLPLSRGSLAAVAHAQSLVEAQPNVDKLVEDHLAVQSLIRAYQ | |
| | IRGHHVAQLDPLGILDADLDSSVPADIISSTDKLGFYGLDESDLDKVF | |
| | HLPTTTFIGGQESALPLREIIRRLEMAYCQHIGVEFMFINDLEQCQWI | |
| | RQKFETPGIMQFTNEEKRTLLARLVRSTRFEEFLQRKWSSEKRFGLE | |
| | GCEVLIPALKTIIDKSSENGVDYVIMGMPHRGRLNVLANVIRKELEQ | |
| | IFCQFDSKLEAADEGSGDVKYHLGMYHRRINRVTDRNITLSLVANP | |
| | SHLEAADPVVMGKTKAEQFYCGDTEGKKVMSILLHGDAAFAGQGI | |
| | VYETFHLSDLPSYTTHGTVHVVVNNQIGFTTDPRMARSSPYPTDVA | |
| | RVVNAPIFHVNSDDPEAVMYVCKVAAEWRSTFHKDVVVDLVCYR | |
| | RNGHNEMDEPMFTQPLMYKQIRKQKPVLQKYAELLVSQGVVNQPE | |
| | YEEEISKYDKICEEAFARSKDEKILHIKHWLDSPWPGFFTLDGQPRS | |
| | MSCPSTGLTEDILTHIGNVASSVPVENFTIHGGLSRILKTRGEMVKNR | |
| | TVDWALAEYMAFGSLLKEGIHIRLSGQDVERGTFSHRHHVLHDQN | |
| | VDKRTCIPMNHLWPNQAPYTVCNSSLSEYGVLGFELGFAMASPNAL | |
| | VLWEAQFGDFHNTAQCIIDQFICPGQAKWVRQNGIVLLLPHGMEG | |
| | MGPEHSSARPERFLQMCNDDPDVLPDLKEANFDINQLYDCNWVVV | |
| | NCSTPGNFFHVLRRQILLPFRKPLIIFTPKSLLRHPEARSSFDEMLPGT | |
| | HFQRVIPEDGPAAQNPENVKRLLFCTGKVYYDLTRERKARDMVGQ | |
| | VAITRIEQLSPFPFDLLLKEVQKYPNAELAWCQEEHKNQGYYDYVK | |
| | PRLRTTISRAKPVWYAGRDPAAAPATGNKKTHLTELQRLLDTAFDL | |
| | DVFKNFS | |
| 367 | MVGYDPKPDGRNNTKFQVAVAGSVSGLVTRALISPFDVIKIRFQLQ | SLC25A19 |
| | HERLSRSDPSAKYHGILQASRQILQEEGPTAFWKGHVPAQILSIGYG | |
| | AVQFLSFEMLTELVHRGSVYDAREFSVHFVCGGLAACMATLTVHP | |
| | VDVLRTRFAAQGEPKVYNTLRHAVGTMYRSEGPQVFYKGLAPTLI | |
| | AIFPYAGLQFSCYSSLKHLYKWAIPAEGKKNENLQNLLCGSGAGVIS | |
| | KTLTYPLDLFKKRLQVGGFEHARAAFGQVRRYKGLMDCAKQVLQ | |
| | KEGALGFFKGLSPSLLKAALSTGFMF | |
| | FSYEFFCNVFHCMNRTASQR | |
| 368 | MASATAAAARRGLGRALPLFWRGYQTERGVYGYRPRKPESREPQG | DHTKD1 |
| | ALERPPVDHGLARLVTVYCEHGHKAAKINPLFTGQALLENVPEIQA | |
| | LVQTLQGPFHTAGLLNMGKEEASLEEVLVYLNQIYCGQISIETSQLQ | |
| | SQDEKDWFAKRFEELQKETFTTEERKHLSKLMLESQEFDHFLATKF | |
| | STVKRYGGEGAESMMGFFHELLKMSAYSGITDVIIGMPHRGRLNLL | |
| | TGLLQFPPELMFRKMRGLSEFPENFSATGDVLSHLTSSVDLYFGAHH | |
| | PLHVTMLPNPSHLEAVNPVAVGK | |
| | TRGRQQSRQDGDYSPDNSAQPGDRVICLQVHGDASFCGQGIVPETF | |
| | TLSNLPHFRIGGSVHLIVNNQLGYTTPAERGRSSLYCSDIGKLVGCAI | |
| | IHVNGDSPEEVVRATRLAFEYQRQFRKDVIIDLLCYRQWGHNELDE | |
| | PFYTNPIMYKIIRARKSIPDTYAEHLIAGGLMTQEEVSEIKSSYYAKL | |
| | NDHLNNMAHYRPPALNLQAHWQGLAQPEAQITTWSTGVPLDLLRF | |
| | VGMKSVEVPRELQMHSHLLKTHVQSRMEKMMDGIKLDWATAEAL | |
| | ALGSLLAQGFNVRLSGQDVGRGT | |
| | FSQRHAIVVCQETDDTYIPLNHMDPNQKGFLEVSNSPLSEEAVLGFE | |
| | YGMSIESPKLLPLWEAQFGDFFNGAQIIFDTFISGGEAKWLLQSGIVI | |
| | LLPHGYDGAGPDHSSCRIERFLQMCDSAEEGVDGDTVNMFVVHPT | |
| | TPAQYFHLLRRQMVRNFRKPLIVASPKMLLRLPAAVSTLQEMAPGT | |
| | TFNPVIGDSSVDPKKVKTLVFCSGKHFYSLVKQRESLGAKKHDFAII | |
| | RVEELCPFPLDSLQQEMSKYKHVKDHIWSQEEPQNMGPWSFVSPRF | |
| | EKQLACKLRLVGRPPLPVPAV | |
| | GIGTVHLHQHEDILAKTFA | |
| 369 | MASALSYVSKFKSFVILFVTPLLLLPLVILMPAKFVRCAYVIILMAIY | SLC13A5 |
| | WCTEVIPLAVTSLMPVLLFPLFQILDSRQVCVQYMKDTNMLFLGGLI | |
| | VAVAVERWNLHKRIALRTLLWVGAKPARLMLGFMGVTALLSMWI | |
| | SNTATTAMMVPIVEAILQQMEATSAATEAGLELVDKGKAKELPGSQ | |
| | VIFEGPTLGQQEDQERKRLCKAMTLCICYAASIGGTATLTGTGPNVV | |
| | LLGQMNELFPDSKDLVNFASWFAFAFPNMLVMLLFAWLWLQFVY | |
| | MRFNFKKSWGCGLESKKNEKAALKVLQEEYRKLGPLSFAEINVLIC | |
| | FFLLVILWFSRDPGFMPGWLTVAWVEGETKYVSDATVAIFVATLLFI | |
| | VPSQKPKFNFRSQTEEERKTPFYPPPLLDWKVTQEKVPWGIVLLLGG | |
| | GFALAKGSEASGLSVWMGKQMEPLHAVPPAAITLILSLLVAVFTEC | |
| | TSNVATTTLFLPIFASMSRSIGLNPLYIMLPCTLSASFAFMLPVATPPN | |
| | AIVFTYGHLKVADMVKTGVIMNIIGVFCVFLAVNTWGRAIFDLDHF | |
| | PDWANVTHIET | |
| 370 | MYRALRLLARSRPLVRAPAAALASAPGLGGAAVPSFWPPNAARMA | FH |
| | SQNSFRIEYDTFGELKVPNDKYYGAQTVRSTMNFKIGGVTERMPTP | |
| | VIKAFGILKRAAAEVNQDYGLDPKIANAIMKAADEVAEGKLNDHFP | |
| | LVVWQTGSGTQTNMNVNEVISNRAIEMLGGELGSKIPVHPNDHVN | |
| | KSQSSNDTFPTAMHIAAAIEVHEVLLPGLQKLHDALDAKSKEFAQII | |
| | KIGRTHTQDAVPLTLGQEFSGYVQQVKYAMTRIKAAMPRIYELAAG | |
| | GTAVGTGLNTRIGFAEKVAAKVAALTGLPFVTAPNKFEALAAHDA | |
| | LVELSGAMNTTACSLMKIANDIRFLGSGPRSGLGELILPENEPGSSIM | |
| | PGKVNPTQCEAMTMVAAQVMGNHVAVTVGGSNGHFELNVFKPM | |
| | MIKNVLHSARLLGDASVSFTENCVVGIQANTERINKLMNESLMLVT | |
| | ALNPHIGYDKAAKIAKTAHKNGSTLKETAIELGYLTAEQFDEWVKP | |
| | KDMLGPK | |
| 371 | MWRVCARRAQNVAPWAGLEARWTALQEVPGTPRVTSRSGPAPAR | DLAT |
| | RNSVTTGYGGVRALCGWTPSSGATPRNRLLLQLLGSPGRRYYSLPP | |
| | HQKVPLPSLSPTMQAGTIARWEKKEGDKINEGDLIAEVETDKATVG | |
| | FESLEECYMAKILVAEGTRDVPIGAIICITVGKPEDIEAFKNYTLDSSA | |
| | APTPQAAPAPTPAATASPPTPSAQAPGSSYPPHMQVLLPALSPTMTM | |
| | GTVQRWEKKVGEKLSEGDLLAEIETDKATIGFEVQEEGYLAKILVPE | |
| | GTRDVPLGTPLCIIVEKEADISAFADYRPTEVTDLKPQVPPPTPPPVA | |
| | AVPPTPQPLAPTPSAPCPATPAGPKGRVFVSPLAKKLAVEKGIDLTQ | |
| | VKGTGPDGRITKKDIDSFVPSKVAPAPAAVVPPTGPGMAPVPTGVFT | |
| | DIPISNIRRVIAQRLMQSKQTIPHYYLSIDVNMGEVLLVRKELNKILE | |
| | GRSKISVNDFIIKASALACLKVPEANSSWMDTVIRQNHVVDVSVAV | |
| | STPAGLITPIVFNAHIKGVETIANDVVSLATKAREGKLQPHEFQGGTF | |
| | TISNLGMFGIKNFSAIINPPQACILAIGASEDKLVPADNEKGFDVASM | |
| | MSVTLSCDHRVVDGAVGAQWLAEFRKYLEKPITMLL | |
| 372 | MAGALVRKAADYVRSKDFRDYLMSTHFWGPVANWGLPIAAINDM | MPC1 |
| | KKSPEIISGRMTFALCCYSLTFMRFAYKVQPRNWLLFACHATNEVA | |
| | QLIQGGRLIKHEMTKTASA | |
| 373 | MRKMLAAVSRVLSGASQKPASRVLVASRNFANDATFEIKKCDLHR | PDHA1 |
| | LEEGPPVTTVLTREDGLKYYRMMQTVRRMELKADQLYKQKIIRGF | |
| | CHLCDGQEACCVGLEAGINPTDHLITAYRAHGFTFTRGLSVREILAE | |
| | LTGRKGGCAKGKGGSMHMYAKNFYGGNGIVGAQVPLGAGIALAC | |
| | KYNGKDEVCLTLYGDGAANQGQIFEAYNMAALWKLPCIFICENNR | |
| | YGMGTSVERAAASTDYYKRGDFIPGLRVDGMDILCVREATRFAAA | |
| | YCRSGKGPILMELQTYRYHGHSMSDPGVSYRTREEIQEVRSKSDPIM | |
| | LLKDRMVNSNLASVEELKEIDVEVRKEIEDAAQFATADPEPPLEELG | |
| | YHIYSSDPPFEVRGANQWIKFKSVS | |
| 374 | MAAVSGLVRRPLREVSGLLKRRFHWTAPAALQVTVRDAINQGMDE | PDHB |
| | ELERDEKVFLLGEEVAQYDGAYKVSRGLWKKYGDKRIIDTPISEMG | |
| | FAGIAVGAAMAGLRPICEFMTFNFSMQAIDQVINSAAKTYYMSGGL | |
| | QPVPIVFRGPNGASAGVAAQHSQCFAAWYGHCPGLKVVSPWNSED | |
| | AKGLIKSAIRDNNPVVVLENELMYGVPFEFPPEAQSKDFLIPIGKAKI | |
| | ERQGTHITVVSHSRPVGHCLEAAAVLSKEGVECEVINMRTIRPMDM | |
| | ETIEASVMKTNHLVTVEGGWPQFG | |
| | VGAEICARIMEGPAFNFLDAPAVRVTGADVPMPYAKILEDNSIPQVK | |
| | DIIFAIKKTLNI | |
| 375 | MAASWRLGCDPRLLRYLVGFPGRRSVGLVKGALGWSVSRGANWR | PDHX |
| | WFHSTQWLRGDPIKILMPSLSPTMEEGNIVKWLKKEGEAVSAGDAL | |
| | CEIETDKAVVTLDASDDGILAKIVVEEGSKNIRLGSLIGLIVEEGEDW | |
| | KHVEIPKDVGPPPPVSKPSEPRPSPEPQISIPVKKEHIPGTLRFRLSPAA | |
| | RNILEKHSLDASQGTATGPRGIFTKEDALKLVQLKQTGKITESRPTP | |
| | APTATPTAPSPLQATAGPSYPRPVIPPVSTPGQPNAVGTFTEIPASNIR | |
| | RVIAKRLTESKSTVPHAYATADCDLGAVLKVRQDLVKDDIKVSVN | |
| | DFIIKAAAVTLKQMPDVNVSWDGEGPKQLPFIDISVAVATDKGLLTP | |
| | IIKDAAAKGIQEIADSVKALSKKARDGKLLPEEYQGGSFSISNLGMF | |
| | GIDEFTAVINPPQACILAVGRFRPVLKLTEDEEGNAKLQQRQLITVT | |
| | MSSDSRVVDDELATRFLKSFKANLENPIRLA | |
| 376 | MPAPTQLFFPLIRNCELSRIYGTACYCHHKHLCCSSSYIPQSRLRYTP | PDP1 |
| | HPAYATFCRPKENWWQYTQGRRYASTPQKFYLTPPQVNSILKANE | |
| | YSFKVPEFDGKNVSSILGFDSNQLPANAPIEDRRSAATCLQTRGMLL | |
| | GVFDGHAGCACSQAVSERLFYYIAVSLLPHETLLEIENAVESGRALL | |
| | PILQWHKHPNDYFSKEASKLYFNSLRTYWQELIDLNTGESTDIDVKE | |
| | ALINAFKRLDNDISLEAQVGDPNSFLNYLVLRVAFSGATACVAHVD | |
| | GVDLHVANTGDSRAMLGVQEEDGSWSAVTLSNDHNAQNERELER | |
| | LKLEHPKSEAKSVVKQDRLLGLLMPFRAFGDVKFKWSIDLQKRVIE | |
| | SGPDQLNDNEYTKFIPPNYHTPPYLTAEPEVTYHRLRPQDKFLVLAT | |
| | DGLWETMHRQDVVRIVGEYLTGMHHQQPIAVGGYKVTLGQMHGL | |
| | LTERRTKMSSVFEDQNAATHLIRHAVGNNEFGTVDHERLSKMLSLP | |
| | EELARMYRDDITIIVVQFNSHVVGAYQNQE | |
| 377 | MLEKFCNSTFWNSSFLDSPEADLPLCFEQTVLVWIPLGYLWLLAPW | ABCC2 |
| | QLLHVYKSRTKRSSTTKLYLAKQVFVGFLLILAAIELALVLTEDSGQ | |
| | ATVPAVRYTNPSLYLGTWLLVLLIQYSRQWCVQKNSWFLSLFWILS | |
| | ILCGTFQFQTLIRTLLQGDNSNLAYSCLFFISYGFQILILIFSAFSENNE | |
| | SSNNPSSIASFLSSITYSWYDSIILKGYKRPLTLEDVWEVDEEMKTKT | |
| | LVS | |
| | KFETHMKRELQKARRALQRRQEKSSQQNSGARLPGLNKNQSQSQD | |
| | ALVLEDVEKKKKKSGTKKDVPKSWLMKALFKTFYMVLLKSFLLKL | |
| | VNDIFTFVSPQLLKLLISFASDRDTYLWIGYLCAILLFTAALIQSFCLQ | |
| | CYFQLCFKLGVKVRTAIMASVYKKALTLSNLARKEYTVGETVNLM | |
| | SVDAQKLMDVTNFMHMLWSSVLQIVLSIFFLWRELGPSVLAGVGV | |
| | MVLVIPINAILSTKSKTIQVKNMKNKDKRLKIMNEILSGIKILKYFAW | |
| | EPSFRDQVQNLRKKELKNLLAFS | |
| | QLQCVVIFVFQLTPVLVSVVTFSVYVLVDSNNILDAQKAFTSITLFNI | |
| | LRFPLSMLPMMISSMLQASVSTERLEKYLGGDDLDTSAIRHDCNFD | |
| | KAMQFSEASFTWEHDSEATVRDVNLDIMAGQLVAVIGPVGSGKSSL | |
| | ISAMLGEMENVHGHITIKGTTAYVPQQSWIQNGTIKDNILFGTEFNE | |
| | KRYQQVLEACALLPDLEMLPGGDLAEIGEKGINLSGGQKQRISLAR | |
| | ATYQNLDIYLLDDPLSAVDAHVGKHIFNKVLGPNGLLKGKTRLLVT | |
| | HSMHFLPQVDEIVVLGNGTIV | |
| | EKGSYSALLAKKGEFAKNLKTFLRHTGPEEEATVHDGSEEEDDDYG | |
| | LISSVEEIPEDAASITMRRENSFRRTLSRSSRSNGRHLKSLRNSLKTRN | |
| | VNSLKEDEELVKGQKLIKKEFIETGKVKFSIYLEYLQAIGLFSIFFIILA | |
| | FVMNSVAFIGSNLWLSAWTSDSKIFNSTDYPASQRDMRVGVYGAL | |
| | GLAQGIFVFIAHFWSAFGFVHASNILHKQLLNNILRAPMRFFDTTPT | |
| | GRI | |
| | VNRFAGDISTVDDTLPQSLRSWITCFLGIISTLVMICMATPVFTIIVIPL | |
| | GIIYVSVQMFYVSTSRQLRRLDSVTRSPIYSHFSETVSGLPVIRAFEH | |
| | QQRFLKHNEVRIDTNQKCVFSWITSNRWLAIRLELVGNLTVFFSAL | |
| | MMVIYRDTLSGDTVGFVLSNALNITQTLNWLVRMTSEIETNIVAVE | |
| | RITEYTKVENEAPWVTDKRPPPDWPSKGKIQFNNYQVRYRPELDLV | |
| | LRGI | |
| | TCDIGSMEKIGVVGRTGAGKSSLTNCLFRILEAAGGQIIIDGVDIASIG | |
| | LHDLREKLTIIPQDPILFSGSLRMNLDPFNNYSDEEIWKALELAHLKS | |
| | FVASLQLGLSHEVTEAGGNLSIGQRQLLCLGRALLRKSKILVLDEAT | |
| | AAVDLETDNLIQTTIQNEFAHCTVITIAHRLHTIMDSDKVMVLDNGK | |
| | IIECGSPEELLQIPGPFYFMAKEAGIENVNSTKF | |
| 378 | MDQNQHLNKTAEAQPSENKKTRYCNGLKMFLAALSLSFIAKTLGAI | SLCO1B1 |
| | IMKSSIIHIERRFEISSSLVGFIDGSFEIGNLLVIVFVSYFGSKLHRPKLI | |
| | GIGCFIMGIGGVLTALPHFFMGYYRYSKETNINSSENSTSTLSTCLIN | |
| | QILSLNRASPEIVGKGCLKESGSYMWIYVFMGNMLRGIGETPIVPLG | |
| | LSYIDDFAKEGHSSLYLGILNAIAMIGPIIGFTLGSLFSKMYVDIGYV | |
| | DLSTIRITPTDSRWVGAWWLNFLVSGLFSHSSIPFFFLPQTPNKPQKE | |
| | RKASLSLHVLETNDEKDQTANLTNQGKNITKNVTGFFQSFKSILTNP | |
| | LYVMFVLLTLLQVSSYIGAFTYVFKYVEQQYGQPSSKANILLGVITIP | |
| | IFASGMFLGGYIIKKFKLNTVGIAKFSCFTAVMSLSFYLLYFFILCEN | |
| | KSVAGLTMTYDGNNPVTSHRDVPLSYCNSDCNCDESQWEPVCGNN | |
| | GITYISPCLAGCKSSSGNKKPIVFYNCSCLEVTGLQNRNYSAHLGEC | |
| | PRDDACTRKFYFFVAIQVLNLFFSALGGTSHVMLIVKIVQPELKSLA | |
| | LGFHSMVIRALGGILAPIYFGALIDTTCIKWSTNNCGTRGSCRTYNST | |
| | SFSRVYLGLSSMLRVSSLVLYIILIYAMKKKYQEKDINASENGSVMD | |
| | EANLESLNKNKHFVPSAGADSETHC | |
| 379 | MDQHQHLNKTAESASSEKKKTRRCNGFKMFLAALSFSYIAKALGGI | SLCO1B3 |
| | IMKISITQIERRFDISSSLAGLIDGSFEIGNLLVIVFVSYFGSKLHRPKLI | |
| | GIGCLLMGTGSILTSLPHFFMGYYRYSKETHINPSENSTSSLSTCLINQ | |
| | TLSFNGTSPEIVEKDCVKESGSHMWIYVFMGNMLRGIGETPIVPLGIS | |
| | YIDDFAKEGHSSLYLGSLNAIGMIGPVIGFALGSLFAKMYVDIGYV | |
| | DLSTIRITPKDSRWVGAWWLGFLVSGLFSHSSIPFFFLPKNPNKPQKE | |
| | RKISLSLHVLKTNDDRNQTANLTNQGKNVTKNVTGFFQSLKSILTNP | |
| | LYVIFLLLTLLQVSSFIGSFTYVFKYMEQQYGQSASHANFLLGIITIPT | |
| | VATGMFLGGFIIKKFKLSLVGIAKFSFLTSMISFLFQLLYFPLICESKS | |
| | VAGLTLTYDGNNSVASHVDVPLSYCNSECNCDESQWEPVCGNNGI | |
| | TYLSPCLAGCKSSSGIKKHTVFYNCSCVEVTGLQNRNYSAHLGECP | |
| | RDNTCTRKFFIYVAIQVINSLFSATGGTTFILLTVKIVQPELKALAMG | |
| | FQSMVIRTLGGILAPIYFGALIDKTCMKWSTNSCGAQGACRIYNSVF | |
| | FGRVYLGLSIALRFPALVLYIVFIFAMKKKFQGKDTKASDNERKVM | |
| | DEANLEFLNNGEHFVPSAGTDSKTCNLDMQDNAAAN | |
| 380 | MGEPGQSPSPRSSHGSPPTLSTLTLLLLLCGHAHSQCKILRCNAEYVS | HFE2 |
| | STLSLRGGGSSGALRGGGGGGRGGGVGSGGLCRALRSYALCTRRT | |
| | ARTCRGDLAFHSAVHGIEDLMIQHNCSRQGPTAPPPPRGPALPGAGS | |
| | GLPAPDPCDYEGRFSRLHGRPPGFLHCASFGDPHVRSFHHHFHTCR | |
| | VQGAWPLLDNDFLFVQATSSPMALGANATATRKLTIIFKNMQECID | |
| | QKVYQAEVDNLPVAFEDGSINGGDRPGGSSLSIQTANPGNHVEIQA | |
| | AYIGTTIIIRQTAGQLSFSIKVAEDVAMAFSAEQDLQLCVGGCPPSQR | |
| | LSRSERNRRGAITIDTARRLCKEGLPVEDAYFHSCVFDVLISGDPNFT | |
| | VAAQAALEDARAFLPDLEKLHLFPSDAGVPLSSATLLAPLLSGLFVL | |
| | WLCIQ | |
| 381 | MHQRHPRARCPPLCVAGILACGFLLGCWGPSHFQQSCLQALEPQAV | ADAMTS13 |
| | SSYLSPGAPLKGRPPSPGFQRQRQRQRRAAGGILHLELLVAVGPDVF | |
| | QAHQEDTERYVLTNLNIGAELLRDPSLGAQFRVHLVKMVILTEPEG | |
| | APNITANLTSSLLSVCGWSQTINPEDDTDPGHADLVLYITRFDLELPD | |
| | GNRQVRGVTQLGGACSPTWSCLITEDTGFDLGVTIAHEIGHSFGLEH | |
| | DGAPGSGCGPSGHVMASDGAAPRAGLAWSPCSRRQLLSLLSAGRA | |
| | RCVWDPPRPQPGSAGHPPDAQPGLYYSANEQCRVAFGPKAVACTF | |
| | AREHLDMCQALSCHTDPLDQSSCSRLLVPLLDGTECGVEKWCSKG | |
| | RCRSLVELTPIAAVHGRWSSWGPRSPCSRSCGGGVVTRRRQCNNPR | |
| | PAFGGRACVGADLQAEMCNTQACEKTQLEFMSQQCARTDGQPLRS | |
| | SPGGASFYHWGAAVPHSQGDALCRHMCRAIGESFIMKRGDSFLDG | |
| | TRCMPSGPREDGTLSLCVSGSCRTFGCDGRMDSQQVWDRCQVCGG | |
| | DNSTCSPRKGSFTAGRAREYVTFLTVTPNLTSVYIANHRPLFTHLAV | |
| | RIGGRYVVAGKMSISPNTTYPSLLEDGRVEYRVALTEDRLPRLEEIRI | |
| | WGPLQEDADIQVYRRYGEEYGNLTRPDITFTYFQPKPRQAWVWAA | |
| | VRGPCSVSCGAGLRWVNYSCLDQARKELVETVQCQGSQQPPAWPE | |
| | ACVLEPCPPYWAVGDFGPCSASCGGGLRERPVRCVEAQGSLLKTLP | |
| | PARCRAGAQQPAVALETCNPQPCPARWEVSEPSSCTSAGGAGLALE | |
| | NETCVPGADGLEAPVTEGPGSVDEKLPAPEPCVGMSCPPGWGHLD | |
| | ATSAGEKAPSPWGSIRTGAQAAHVWTPAAGSCSVSCGRGLMELRF | |
| | LCMDSALRVPVQEELCGLASKPGSRREVCQAVPCPARWQYKLAAC | |
| | SVSCGRGVVRRILYCARAHGEDDGEEILLDTQCQGLPRPEPQEACSL | |
| | EPCPPRWKVMSLGPCSASCGLGTARRSVACVQLDQGQDVEVDEAA | |
| | CAALVRPEASVPCLIADCTYRWHVGTWMECSVSCGDGIQRRRDTC | |
| | LGPQAQAPVPADFCQHLPKPVTVRGCWAGPCVGQGTPSLVPHEEA | |
| | AAPGRTTATPAGASLEWSQARGLLFSPAPQPRRLLPGPQENSVQSSA | |
| | CGRQHLEPTGTIDMRGPGQADCAVAIGRPLGEVVTLRVLESSLNCS | |
| | AGDMLLLWGRLTWRKMCRKLLDMTFSSKTNTLVVRQRCGRPGGG | |
| | VLLRYGSQLAPETFYRECDMQLFGPWGEIVSPSLSPATSNAGGCRLF | |
| | INVAPHARIAIHALATNMGAGTEGANASYILIRDTHSLRTTAFHGQQ | |
| | VLYWESESSQAEMEFSEGFLKAQASLRGQYWTLQSWVPEMQDPQS | |
| | WKGKEGT | |
| 382 | MSRPLSDQEKRKQISVRGLAGVENVTELKKNFNRHLHFTLVKDRN | PYGM |
| | VATPRDYYFALAHTVRDHLVGRWIRTQQHYYEKDPKRIYYLSLEFY | |
| | MGRTLQNTMVNLALENACDEATYQLGLDMEELEEIEEDAGLGNGG | |
| | LGRLAACFLDSMATLGLAAYGYGIRYEFGIFNQKISGGWQMEEAD | |
| | DWLRYGNPWEKARPEFTLPVHFYGHVEHTSQGAKWVDTQVVLAM | |
| | PYDTPVPGYRNNVVNTMRLWSAKAPNDFNLKDFNVGGYIQAVLD | |
| | RNLAENISRVLYPNDNFFEGKELRLKQEYFVVAATLQDIIRRFKSSK | |
| | FGCRDPVRTNFDAFPDKVAIQLNDTHPSLAIPELMRILVDLERM | |
| | DWDKAWDVTVRTCAYTNHTVLPEALERWPVHLLETLLPRHLQIIYE | |
| | INQRFLNRVAAAFPGDVDRLRRMSLVEEGAVKRINMAHLCIAGSHA | |
| | VNGVARIHSEILKKTIFKDFYELEPHKFQNKTNGITPRRWLVLCNPG | |
| | LAEVIAERIGEDFISDLDQLRKLLSFVDDEAFIRDVAKVKQENKLKF | |
| | AAYLEREYKVHINPNSLFDIQVKRIHEYKRQLLNCLHVITLYNRIKR | |
| | EPNKFFVPRTVMIGGKAAPGYHMAKMIIRLVTAIGDVVNHDPAVG | |
| | DRLRVIFLENYRVSLAEKVIPAADLSEQISTAGTEASGTGNMKFMLN | |
| | GALTIGTMDGANVEMAEEAGEENFFIFGMRVEDVDKLDQRGYNAQ | |
| | EYYDRIPELRQVIEQLSSGFFSPKQPDLFKDIVNMLMHHDRFKVFAD | |
| | YEDYIKCQEKVSALYKNPREWTRMVIRNIATSGKFSSDRTIAQYARE | |
| | IWGVEPSRQRLPAPDEAI | |
| 383 | MLSFVDTRTLLLLAVTLCLATCQSLQEETVRKGPAGDRGPRGERGP | COL1A2 |
| | PGPPGRDGEDGPTGPPGPPGPPGPPGLGGNFAAQYDGKGVGLGPGP | |
| | MGLMGPRGPPGAAGAPGPQGFQGPAGEPGEPGQTGPAGARGPAGP | |
| | PGKAGEDGHPGKPGRPGERGVVGPQGARGFPGTPGLPGFKGIRGHN | |
| | GLDGLKGQPGAPGVKGEPGAPGENGTPGQTGARGLPGERGRVGAP | |
| | GPAGARGSDGSVGPVGPAGPIGSAGPPGFPGAPGPKGEIGAVGNAG | |
| | PAGPAGPRGEVGLPGLSGPVGPPGNP | |
| | GANGLTGAKGAAGLPGVAGAPGLPGPRGIPGPVGAAGATGARGLV | |
| | GEPGPAGSKGESGNKGEPGSAGPQGPPGPSGEEGKRGPNGEAGSAG | |
| | PPGPPGLRGSPGSRGLPGADGRAGVMGPPGSRGASGPAGVRGPNGD | |
| | AGRPGEPGLMGPRGLPGSPGNIGPAGKEGPVGLPGIDGRPGPIGPAG | |
| | ARGEPGNIGFPGPKGPTGDPGKNGDKGHAGLAGARGAPGPDGNNG | |
| | AQGPPGPQGVQGGKGEQGPPGPPGFQGLPGPSGPAGEVGKPGERGL | |
| | HGEFGLPGPAGPRGERGPPGESGAA | |
| | GPTGPIGSRGPSGPPGPDGNKGEPGVVGAVGTAGPSGPSGLPGERGA | |
| | AGIPGGKGEKGEPGLRGEIGNPGRDGARGAPGAVGAPGPAGATGD | |
| | RGEAGAAGPAGPAGPRGSPGERGEVGPAGPNGFAGPAGAAGQPGA | |
| | KGERGAKGPKGENGVVGPTGPVGAAGPAGPNGPPGPAGSRGDGGP | |
| | PGMTGFPGAAGRTGPPGPSGISGPPGPPGPAGKEGLRGPRGDQGPV | |
| | GRTGEVGAVGPPGFAGEKGPSGEAGTAGPPGTPGPQGLLGAPGILG | |
| | LPGSRGERGLPGVAGAVGEPGPLGIAGPPGARGPPGAVGSPGVNGA | |
| | PGEAGRDGNPGNDGPPGRDGQPGHKGERGYPGNIGPVGAAGAPGP | |
| | HGPVGPAGKHGNRGETGPSGPVGPAGAVGPRGPSGPQGIRGDKGEP | |
| | GEKGPRGLPGLKGHNGLQGLPGIAGHHGDQGAPGSVGPAGPRGPA | |
| | GPSGPAGKDGRTGHPGTVGPAGIRGPQGHQGPAGPPGPPGPPGPPG | |
| | VSGGGYDFGYDGDFYRADQPRSAPSLRPKDYEVDATLKSLNNQIET | |
| | LLTPEGSRKNPARTCRDLRLSHPEWSSGYYWIDPNQGCTMDAIKVY | |
| | CDFSTGETCIRAQPENIPAKNWYRSSKDKKHVWLGETINAGSQFEY | |
| | NVEGVTSKEMATQLAFMRLLANYASQNITYHCKNSIAYMDEETGN | |
| | LKKAVILQGSNDVELVAEGNSRFTYTVLVDGCSKKTNEWGKTIIEY | |
| | KTNKPSRLPFLDIAPLDIGGADQEFFVDIGPVCFK | |
| 384 | MNNLLCCALVFLDISIKWTTQETFPPKYLHYDEETSHQLLCDKCPPG | TNFRSF11B |
| | TYLKQHCTAKWKTVCAPCPDHYYTDSWHTSDECLYCSPVCKELQY | |
| | VKQECNRTHNRVCECKEGRYLEIEFCLKHRSCPPGFGVVQAGTPER | |
| | NTVCKRCPDGFFSNETSSKAPCRKHTNCSVFGLLLTQKGNATHDNI | |
| | CSGNSESTQKCGIDVTLCEEAFFRFAVPTKFTPNWLSVLVDNLPGTK | |
| | VNAESVERIKRQHSSQEQTFQLLKLWKHQNKDQDIVKKIIQDIDLCE | |
| | NSVQRHIGHANLTFEQLRSLMESLPGKKVGAEDIEKTIKACKPSDQI | |
| | LKLLSLWRIKNGDQDTLKGLMHALKHSKTYHFPKTVTQSLKKTIRF | |
| | LHSFTMYKLYQKLFLEMIGNQVQSVKISCL | |
| 385 | MAQQANVGELLAMLDSPMLGVRDDVTAVFKENLNSDRGPMLVNT | TSC1 |
| | LVDYYLETSSQPALHILTTLQEPHDKHLLDRINEYVGKAATRLSILSL | |
| | LGHVIRLQPSWKHKLSQAPLLPSLLKCLKMDTDVVVLTTGVLVLIT | |
| | MLPMIPQSGKQHLLDFFDIFGRLSSWCLKKPGHVAEVYLVHLHASV | |
| | YALFHRLYGMYPCNFVSFLRSHYSMKENLETFEEVVKPMMEHVRI | |
| | HPELVTGSKDHELDPRRWKRLETHDVVIECAKISLDPTEASYEDGYS | |
| | VSHQISARFPHRSADVTTSPYADT | |
| | QNSYGCATSTPYSTSRLMLLNMPGQLPQTLSSPSTRLITEPPQATLW | |
| | SPSMVCGMTTPPTSPGNVPPDLSHPYSKVFGTTAGGKGTPLGTPATS | |
| | PPPAPLCHSDDYVHISLPQATVTPPRKEERMDSARPCLHRQHHLLND | |
| | RGSEEPPGSKGSVTLSDLPGFLGDLASEEDSIEKDKEEAAISRELSEIT | |
| | TAEAEPVVPRGGFDSPFYRDSLPGSQRKTHSAASSSQGASVNPEPLH | |
| | SSL | |
| | DKLGPDTPKQAFTPIDLPCGSADESPAGDRECQTSLETSIFTPSPCKIP | |
| | PPTRVGFGSGQPPPYDHLFEVALPKTAHHFVIRKTEELLKKAKGNTE | |
| | EDGVPSTSPMEVLDRLIQQGADAHSKELNKLPLPSKSVDWTHFGGS | |
| | PPSDEIRTLRDQLLLLHNQLLYERFKRQQHALRNRRLLRKVIKAAAL | |
| | EEHNAAMKDQLKLQEKDIQMWKVSLQKEQARYNQLQEQRDTMVT | |
| | KLHSQIRQLQHDREEFYNQSQELQTKLEDCRNMIAELRIELKKANN | |
| | KVCHTELLLSQVSQKLSNSESVQQQMEFLNRQLLVLGEVNELYLEQ | |
| | LQNKHSDTTKEVEMMKAAYRKELEKNRSHVLQQTQRLDTSQKRIL | |
| | ELESHLAKKDHLLLEQKKYLEDVKLQARGQLQAAESRYEAQKRIT | |
| | QVFELEILDLYGRLEKDGLLKKLEEEKAEAAEAAEERLDCCNDGCS | |
| | DSMVGHNEEASGHNGETKTPRPSSARGSSGSRGGGGSSSSSSELSTP | |
| | EKPPHQRAGPFSSRWETTMGEASASIPTTVGSLPSSKSFLGMKAREL | |
| | FRNKSESQCDEDGMTSSLSESLKTELGKDLGVEAKIPLNLDGPHPSP | |
| | PTPDSVGQLHIMDYNETHHEHS | |
| 386 | MAKPTSKDSGLKEKFKILLGLGTPRPNPRSAEGKQTEFIITAEILRELS | TSC2 |
| | MECGLNNRIRMIGQICEVAKTKKFEEHAVEALWKAVADLLQPERPL | |
| | EARHAVLALLKAIVQGQGERLGVLRALFFKVIKDYPSNEDLHERLE | |
| | VFKALTDNGRHITYLEEELADFVLQWMDVGLSSEFLLVLVNLVKFN | |
| | SCYLDEYIARMVQMICLLCVRTASSVDIEVSLQVLDAVVCYNCLPA | |
| | ESLPLFIVTLCRTINVKELCEPCWKLMRNLLGTHLGHSAIYNMCHL | |
| | MEDRAYMEDAPLLRGAVFFVGMALWGAHRLYSLRNSPTSVLPSFY | |
| | QAMACPNEVVSYEIVLSITRLIKKYRKELQVVAWDILLNIIERLLQQL | |
| | QTLDSPELRTIVHDLLTTVEELCDQNEFHGSQERYFELVERCADQRP | |
| | ESSLLNLISYRAQSIHPAKDGWIQNLQALMERFFRSESRGAVRIKVL | |
| | DVLSFVLLINRQFYEEELINSVVISQLSHIPEDKDHQVRKLATQLLVD | |
| | LAEGCHTHHFNSLLDIIEKVMARSLSPPPELEERDVAAYSASLEDVK | |
| | TAVLGLLVILQTKLYTLPASHATRVYEMLVSHIQLHYKHSYTLPIAS | |
| | SIRLQAFDFLLLLRADSLHRLGLPNKDGVVRFSPYCVCDYMEPERGS | |
| | E1(KTSGPLSPPTGPPGPAPAGPAVRLGSVPYSLLFRVLLQCLKQESD | |
| | WKVLKLVLGRLPESLRYKVLIFTSPCSVDQLCSALCSMLSGPKTLER | |
| | LRGAPEGFSRTDLHLAVVPVLTALISYHNYL | |
| | DKTKQREMVYCLEQGLIHRCASQCVVALSICSVEMPDIIIKALPVLV | |
| | VKLTHISATASMAVPLLEFLSTLARLPHLYRNFAAEQYASVFAISLP | |
| | YTNPSKFNQYIVCLAHHVIAMWFIRCRLPFRKDFVPFITKGLRSNVL | |
| | LSFDDTPEKDSFRARSTSLNERPKSLRIARPPKQGLNNSPPVKEFKES | |
| | SAAEAFRCRSISVSEHVVRSRIQTSLTSASLGSADENSVAQADDSLK | |
| | NLHL | |
| | ELTETCLDMMARYVFSNFTAVPKRSPVGEFLLAGGRTKTWLVGNK | |
| | LVTVTTSVGTGTRSLLGLDSGELQSGPESSSSPGVHVRQTKEAPAKL | |
| | ESQAGQQVSRGARDRVRSMSGGHGLRVGALDVPASQFLGSATSPG | |
| | PRTAPAAKPEKASAGTRVPVQEKTNLAAYVPLLTQGWAEILVRRPT | |
| | GNTSWLMSLENPLSPFSSDINNMPLQELSNALMAAERFKEHRDTAL | |
| | YKSLSVPAASTAKPPPLPRSNTVASFSSLYQSSCQGQLHRSVSWADS | |
| | AVVMEEGSPGEVPVLVEPPGLEDV | |
| | EAALGMDRRTDAYSRSSSVSSQEEKSLHAEELVGRGIPIERVVSSEG | |
| | GRPSVDLSFQPSQPLSKSSSSPELQTLQDILGDPGDKADVGRLSPEVK | |
| | ARSQSGTLDGESAAWSASGEDSRGQPEGPLPSSSPRSPSGLRPRGYTI | |
| | SDSAPSRRGKRVERDALKSRATASNAEKVPGINPSFVFLQLYHSPFF | |
| | GDESNKPILLPNESQSFERSVQLLDQIPSYDTHKIAVLYVGEGQSNSE | |
| | LA | |
| | ILSNEHGSYRYTEFLTGLGRLIELKDCQPDKVYLGGLDVCGEDGQFT | |
| | YCWHDDIMQAVFHIATLMPTKDVDKHRCDKKRHLGNDFVSIVYND | |
| | SGEDFKLGTIKGQFNFVHVIVTPLDYECNLVSLQCRKDMEGLVDTS | |
| | VAKIVSDRNLPFVARQMALHANMASQVHHSRSNPTDIYPSKWIARL | |
| | RHIKRLRQRICEEAAYSNPSLPLVHPPSHSKAPAQTPAEPTPGYEVG | |
| | QRKRLISSVEDFTEFV | |
| 387 | MAAKSQPNIPKAKSLDGVTNDRTASQGQWGRAWEVDWFSLASVIF | DHCR7 |
| | LLLFAPFIVYYFIMACDQYSCALTGPVVDIVTGHARLSDIWAKTPPIT | |
| | RKAAQLYTLWVTFQVLLYTSLPDFCHKFLPGYVGGIQEGAVTPAGV | |
| | VNKYQINGLQAWLLTHLLWFANAHLLSWFSPTIIFDNWIPLLWCAN | |
| | ILGYAVSTFAMVKGYFFPTSARDCKFTGNFFYNYMMGIEFNPRIGK | |
| | WFDFKLFFNGRPGIVAWTLINLSFAAKQRELHSHVTNAMVLVNVL | |
| | QAIYVIDFFWNETWYLKTIDICHD | |
| | HFGWYLGWGDCVWLPYLYTLQGLYLVYHPVQLSTPHAVGVLLLG | |
| | LVGYYIFRVANHQKDLFRRTDGRCLIWGRKPKVIECSYTSADGQRH | |
| | HSKLLVSGFWGVARHFNYVGDLMGSLAYCLACGGGHLLPYFYIIY | |
| | [sequence omitted] | |
| 388 | MSLSNKLTLDKLDVKGKRVVMRVDFNVPMKNNQITNNQRIKAAVP | PGK1 |
| | SIKFCLDNGAKSVVLMSHLGRPDGVPMPDKYSLEPVAVELKSLLGK | |
| | DVLFLKDCVGPEVEKACANPAAGSVILLENLRFHVEEEGKGKDASG | |
| | NKVKAEPAKIEAFRASLSKLGDVYVNDAFGTAHRAHSSMVGVNLP | |
| | QKAGGFLMKKELNYFAKALESPERPFLAILGGAKVADKIQLINNML | |
| | DKVNEMIIGGGMAFTFLKVLNNMEIGTSLFDEEGAKIVKDLMSKAE | |
| | KNGVKITLPVDFVTADKFDENAKTGQATVASGIPAGWMGLDCGPE | |
| | SSKKYAEAVTRAKQIVWNGPVGVFEWEAFARGTKALMDEVV | |
| | KATSRGCITIIGGGDTATCCAKWNTEDKVSHVSTGGGASLELLEGK | |
| | VLPGVDALSNI | |
| 389 | MGTSALWALWLLLALCWAPRESGATGTGRKAKCEPSQFQCTNGR | VLDLR |
| | CITLLWKCDGDEDCVDGSDEKNCVKKTCAESDFVCNNGQCVPSRW | |
| | KCDGDPDCEDGSDESPEQCHMRTCRIHEISCGAHSTQCIPVSWRCD | |
| | GENDCDSGEDEENCGNITCSPDEFTCSSGRCISRNFVCNGQDDCSDG | |
| | SDELDCAPPTCGAHEFQCSTSSCIPISWVCDDDADCSDQSDESLEQC | |
| | GRQPVIHTKCPASEIQCGSGECIHKKWRCDGDPDCKDGSDEVNCPS | |
| | RTCRPDQFECEDGSCIHGSRQCNGI | |
| | RDCVDGSDEVNCKNVNQCLGPGKFKCRSGECIDISKVCNQEQDCR | |
| | DWSDEPLKECHINECLVNNGGCSHICKDLVIGYECDCAAGFELIDRK | |
| | TCGDIDECQNPGICSQICINLKGGYKCECSRGYQMDLATGVCKAVG | |
| | KEPSLIFTNRRDIRKIGLERKEYIQLVEQLRNTVALDADIAAQKLFW | |
| | ADLSQKAIFSASIDDKVGRHVKMIDNVYNPAAIAVDWVYKTIYWT | |
| | DAASKTISVATLDGTKRKFLFNSDLREPASIAVDPLSGFVYWSDWG | |
| | EPAKIEKAGMNGFDRRPLVTADIQ | |
| | WPNGITLDLIKSRLYWLDSKLHMLSSVDLNGQDRRIVLKSLEFLAHP | |
| | LALTIFEDRVYWIDGENEAVYGANKFTGSELATLVNNLNDAQDIIV | |
| | YHELVQPSGKNWCEEDMENGGCEYLCLPAPQINDHSPKYTCSCPSG | |
| | YNVEENGRDCQSTATTVTYSETKDTNTTEISATSGLVPGGINVTTAV | |
| | SEVSVPPKGTSAAWAILPLLLLVMAAVGGYLMWRNWQHKNMKS | |
| | MNFDNPVYLKTTEEDLSIDIGRHSASVGHTYPAISVVSTDDDLA | |
| 390 | MEPSSLELPADTVQRIAAELKCHPTDERVALHLDEEDKLRHFRECFY | KYNU |
| | IPKIQDLPPVDLSLVNKDENAIYFLGNSLGLQPKMVKTYLEEELDKW | |
| | AKIAAYGHEVGKRPWITGDESIVGLMKDIVGANEKEIALMNALTVN | |
| | LHLLMLSFFKPTPKRYKILLEAKAFPSDHYAIESQLQLHGLNIEESMR | |
| | MIKPREGEETLRIEDILEVIEKEGDSIAVILFSGVHFYTGQHFNIPAITK | |
| | AGQAKGCYVGFDLAHAVGNVELYLHDWGVDFACWCSYKYLNAG | |
| | AGGIAGAFIHEKHAHTIKPALVGWFGHELSTRFKMDNKLQLIPGVC | |
| | GFRISNPPILLVCSLHASLEIFKQATMKALRKKSVLLTGYLEYLIKHN | |
| | YGKDKAATKKPVVNIITPSHVEERGCQLTITFSVPNKDVFQELEKRG | |
| | VVCDKRNPNGIRVAPVPLYNSFHDVYKFTNLLTSILDSAETKN | |
| 391 | MFPGCPRLWVLVVLGTSWVGWGSQGTEAAQLRQFYVAAQGISWS | F5 |
| | YRPEPTNSSLNLSVTSFKKIVYREYEPYFKKEKPQSTISGLLGPTLYA | |
| | EVGDIIKVHFKNKADKPLSIHPQGIRYSKLSEGASYLDHTFPAEKMD | |
| | DAVAPGREYTYEWSISEDSGPTHDDPPCLTHIYYSHENLIEDFNSGLI | |
| | GPLLICKKGTLTEGGTQKTFDKQIVLLFAVFDESKSWSQSSSLMYTV | |
| | NGYVNGTMPDITVCAHDHISWHLLGMSSGPELFSIHFNGQVLEQNH | |
| | HKVSAITLVSATSTTANMTVGPEGKWIISSLTPKHLQAGMQAYIDIK | |
| | NCPKKTRNLKKITREQRRHMKRWEYFIAAEEVIWDYAPVIPANMD | |
| | KKYRSQHLDNFSNQIGKHYKKVMYTQYEDESFTKHTVNPNMKED | |
| | GILGPIIRAQVRDTLKIVFKNMASRPYSIYPHGVTFSPYEDEVNSSFTS | |
| | GRNNTMIRAVQPGETYTYKWNILEFDEPTENDAQCLTRPYYSDVDI | |
| | MRDIASGLIGLLLICKSRSLDRRGIQRAA | |
| | DIEQQAVFAVFDENKSWYLEDNINKFCENPDEVKRDDPKFYESNIM | |
| | STINGYVPESITTLGFCFDDTVQWHFCSVGTQNEILTIHFTGHSFIYG | |
| | KRHEDTLTLFPMRGESVTVTMDNVGTWMLTSMNSSPRSKKLRLKF | |
| | RDVKCIPDDDEDSYEIFEPPESTVMATRKMHDRLEPEDEESDADYD | |
| | YQNRLAAALGIRSFRNSSLNQEEEEFNLTALALENGTEFVSSNTDIIV | |
| | GSNYSSPSNISKFTVNNLAEPQKAPSHQQATTAGSPLRHLIGKNSVL | |
| | NSSTAEHSSPYSEDPIEDPLQPDVTGIRLLSLGAGEFKSQEHAKHKGP | |
| | KVERDQAAKHRFSWMKLLAHKVGRHLSQDTGSPSGMRPWEDLPS | |
| | QDTGSPSRMRPWKDPPSDLLLLKQSNSSKILVGRWHLASEKGSYEII | |
| | QDTDEDTAVNNWLISPQNASRAWGESTPLANKPGKQSGHPKFPRV | |
| | RHKSLQVRQDGGKSRLKKSQFLIKTRKKKKEKHTHHAPLSPRTFHP | |
| | LRSEAYNTFSERRLKHSLVLHKSNETSLPT | |
| | DLNQTLPSMDFGWIASLPDHNQNSSNDTGQASCPPGLYQTVPPEEH | |
| | YQTFPIQDPDQMHSTSDPSHRSSSPELSEMLEYDRSHKSFPTDISQMS | |
| | PSSEHEVWQTVISPDLSQVTLSPELSQTNLSPDLSHTTLSPELIQRNLS | |
| | PALGQMPISPDLSHTTLSPDLSHTTLSLDLSQTNLSPELSQTNLSPAL | |
| | GQMPLSPDLSHTTLSLDFSQTNLSPELSHMTLSPELSQTNLSPALGQ | |
| | MP | |
| | ISPDLSHTTLSLDFSQTNLSPELSQTNLSPALGQMPLSPDPSHTTLSLD | |
| | LSQTNLSPELSQTNLSPDLSEMPLFADLSQIPLTPDLDQMTLSPDLGE | |
| | TDLSPNFGQMSLSPDLSQVTLSPDISDTTLLPDLSQISPPPDLDQIFYP | |
| | SESSQSLLLQEFNESFPYPDLGQMPSPSSPTLNDTFLSKEFNPLVIVGL | |
| | SKDGTDYIEIIPKEEVQSSEDDYAEIDYVPYDDPYKTDVRTNINSSRD | |
| | PDNIAAWYLRSNNGNRRNYYIAAEEISWDYSEFVQRETDIEDSDDIP | |
| | EDTTYKKVVFRKYLDSTFTKRDPRGEYEEHLGILGPIIRAEVDDVIQ | |
| | VRFKNLASRPYSLHAHGLSYEKSSEGKTYEDDSPEWFKEDNAVQPN | |
| | SSYTYVWHATERSGPESPGSACRAWAYYSAVNPEKDIHSGLIGPLLI | |
| | CQKGILHKDSNMPMDMREFVLLFMTFDEKKSWYYEKKSRSSWRLT | |
| | SSEMK | |
| | KSHEFHAINGMIYSLPGLKMYEQEWVRLHLLNIGGSQDIHVVHFHG | |
| | QTLLENGNKQHQLGVWPLLPGSFKTLEMKASKPGWWLLNTEVGE | |
| | NQRAGMQTPFLIMDRDCRMPMGLSTGIISDSQIKASEFLGYWEPRL | |
| | ARLNNGGSYNAWSVEKLAAEFASKPWIQVDMQKEVIITGIQTQGAK | |
| | HYLKSCYTTEFYVAYSSNQINWQIFKGNSTRNVMYFNGNSDASTIK | |
| | ENQFDPPIVARYIRISPTRAYNRPTLRLELQGCEVNGCSTPLGMENG | |
| | KIENKQITASSFKKSWWGDYWEPFR | |
| | ARLNAQGRVNAWQAKANNNKQWLEIDLLKIKKITAIITQGCKSLSS | |
| | EMYVKSYTIHYSEQGVEWKPYRLKSSMVDKIFEGNTNTKGHVKNF | |
| | FNPPIISRFIRVIPKTWNQSIALRLELFGCDIY | |
| 392 | MGPTSGPSLLLLLLTHLPLALGSPMYSIITPNILRLESEETMVLEAHD | C3 |
| | AQGDVPVTVTVHDFPGKKLVLSSEKTVLTPATNHMGNVTFTIPANR | |
| | EFKSEKGRNKFVTVQATFGTQVVEKVVLVSLQSGYLFIQTDKTIYTP | |
| | GSTVLYRIFTVNHKLLPVGRTVMVNIENPEGIPVKQDSLSSQNQLGV | |
| | LPLSWDIPELVNMGQWKIRAYYENSPQQVFSTEFEVKEYVLPSFEVI | |
| | VEPTEKFYYIYNEKGLEVTITARFLYGKKVEGTAFVIFGIQDGEQRIS | |
| | LPESLKRIPIEDGSGEVVLSRKVLLDGVQNPRAEDLVGKSLYVSATV | |
| | ILHSGSDMVQAERSGIPIVTSPYQIHFTKTPKYFKPGMPFDLMVFVT | |
| | NPDGSPAYRVPVAVQGEDTVQSLTQGDGVAKLSINTHPSQKPLSITV | |
| | RTKKQELSEAEQATRTMQALPYSTVGNSNNYLHLSVLRTELRPGET | |
| | LNVNFLLRMDRAHEAKIRYYTYLIMNKGRLLKAGRQVREPGQDLV | |
| | VLPLSITTDFIPSFRLVAYYTLIGASGQREVVADSVWVDVKDSCVGS | |
| | LVVKSGQSEDRQPVPGQQMTLKIEGDHGARVVLVAVDKGVFVLNK | |
| | KNKLTQSKIWDVVEKADIGCTPGSGKDYAGVFSDAGLTFTSSSGQQ | |
| | TAQRAELQCPQPAARRRRSVQLTEKRMDKVGKYPKELRKCCEDG | |
| | MRENPMRFSCQRRTRFISLGEACKKVFLDCCNYITELRRQHARASH | |
| | LGLARSNLDEDIIAEENIVSRSEFPESWLWNVEDLKEPPKNGISTKLM | |
| | NIFLKDSITTWEILAVSMSDKKGICVADPFEVTVMQDFFIDLRLPYSV | |
| | VRNEQVEIRAVLYNYRQNQELKVRVELLHNPAFCSLATTKRRHQQ | |
| | TVTIPPKSSLSVPYVIVPLKTGLQEVEVKAAVYHHFISDGVRKSLKV | |
| | VPEGIRMNKTVAVRTLDPERLGREGVQKEDIPPADLSDQVPDTESET | |
| | RILLQGTPVAQMTEDAVDAERLKHLIVTPSGCGEQNMIGMTPTVIA | |
| | VHYLDETEQWEKFGLEKRQGALELIKKGYTQQLAFRQPSSAFAAFV | |
| | KRAPSTWLTA | |
| | YVVKVFSLAVNLIAIDSQVLCGAVKWLILEKQKPDGVFQEDAPVIH | |
| | QEMIGGLRNNNEKDMALTAFVLISLQEAKDICEEQVNSLPGSITKAG | |
| | DFLEANYMNLQRSYTVAIAGYALAQMGRLKGPLLNKFLTTAKDKN | |
| | RWEDPGKQLYNVEATSYALLALLQLKDFDFVPPVVRWLNEQRYYG | |
| | GGYGSTQATFMVFQALAQYQKDAPDHQELNLDVSLQLPSRSSKITH | |
| | RIHWESASLLRSEETKENEGFTVTAEGKGQGTLSVVTMYHAKAKD | |
| | QLTCNKFDLKVTIKPAPETEKRPQDAKNTMILEICTRYRGDQDATM | |
| | SILDISMMTGFAPDTDDLKQLANGVDRYISKYELDKAFSDRNTLIIY | |
| | LDKVSHSEDDCLAFKVHQYFNVELIQPGAVKVYAYYNLEESCTRFY | |
| | HPEKEDGKLNKLCRDELCRCAEENCFIQKSDDKVTLEERLDKACEP | |
| | GVDYVYKTRLVKVQLSNDFDEYIMAIEQTIKSGSDEVQVGQQRTFIS | |
| | PIKCREALKLEEKKHYLMWGLSSDFWGEKPNLSYIIGKDTWVEHWP | |
| | EEDECQDEENQKQCQDLGAFTESMVVFGCPN | |
| 393 | MGPRLSVWLLLLPAALLLHEEHSRAAAKGGCAGSGCGKCDCHGV | COL4A1 |
| | KGQKGERGLPGLQGVIGFPGMQGPEGPQGPPGQKGDTGEPGLPGTK | |
| | GTRGPPGASGYPGNPGLPGIPGQDGPPGPPGIPGCNGTKGERGPLGP | |
| | PGLPGFAGNPGPPGLPGMKGDPGEILGHVPGMLLKGERGFPGIPGTP | |
| | GPPGLPGLQGPVGPPGFTGPPGPPGPPGPPGEKGQMGLSFQGPKGDK | |
| | GDQGVSGPPGVPGQAQVQEKGDFATKGEKGQKGEPGFQGMPGVG | |
| | EKGEPGKPGPRGKPGKDGDKGEKGSPGFPGEPGYPGLIGRQGPQGE | |
| | KGEAGPPGPPGIVIGTGPLGEKGERGYPGTPGPRGEPGPKGFPGLPG | |
| | QPGPPGLPVPGQAGAPGFPGERGEKGDRGFPGTSLPGPSGRDGLPGP | |
| | PGSPGPPGQPGYTNGIVECQPGPPGDQGPPGIPGQPGFIGEIGEKGQK | |
| | GESCLICDIDGYRGPPGPQGPPGEIGFPGQPGAKGDRGLPGRDGVAG | |
| | VPGPQGTPGLIGQPGAKGEPGEFYFDLRLKGDKGDPGFPGQPGMPG | |
| | RAGSPGRDGHPGLPGPKGSPGSVGLKGERGPPGGVGFPGSRGDTGP | |
| | PGPPGYGPAGPIGDKGQAGFPGGPGSPGLPGPKGEPGKIVPLPGPPG | |
| | AEGLPGSPGFPGPQGDRGFPGTPGRPGLPGEKGAVGQPGIGFPGPPG | |
| | PKGVDGLPGDMGPPGTPGRPGFNGLPGNPGVQGQKGEPGVGLPGL | |
| | KGLPGLPGIPGTPGEKGSIGVPGVPGEHGAIGPPGLQGIRGEPGPPGL | |
| | PGSVGSPGVPGIGPPGARGPPGGQGPPGLSGPPGIKGEKGFPGFPGLD | |
| | MPGPKGDKGAQGLPGITGQSGLPGLPGQQGAPGIPGFPGSKGEMGV | |
| | MGTPGQPGSPGPVGAPGLPGEKGDHGFPGSSGPRGDPGLKGDKGD | |
| | VGLPGKPGSMDKVDMGSMKGQKGDQGEKGQIGPIGEKGSRGDPGT | |
| | PGVPGKDGQAGQPGQPGPKGDPGISGTPGAPGLPGPKGSVGGMGLP | |
| | GTPGEKGVPGIPGPQGSPGLPGDKGAKGEKGQAGPPGIGIPGLRGEK | |
| | GDQGIAGFPGSPGEKGEKGSIGIPGMPGSPGLKGSPGSVGYPGSPGLP | |
| | GEKGDKGLPGLDGIPGVKGEAGLPGTPGPTGPAGQKGEPGSDGIPG | |
| | SAGEKGEPGLPGRGFPGFPGAKGDKGSKGEVGFPGLAGSPGIPGSK | |
| | GEQGFMGPPGPQGQPGLPGSPGHATEGPKGDRGPQGQPGLPGLPGP | |
| | MGPPGLPGIDGVKGDKGNPGWPGAPGVPGPKGDPGFQGMPGIGGS | |
| | PGITGSKGDMGPPGVPGFQGPKGLPGLQGIKGDQGDQGVPGAKGLP | |
| | GPPGPPGPYDIIKGEPGLPGPEGPPGLKGLQGLPGPKGQQGVTGLVG | |
| | IPGPPGIPGFDGAPGQKGEMGPAGPTGPRGFPGPPGPDGLPGSMGPP | |
| | GTPSVDHGFLVTRHSQTIDDPQCPSGTKILYHGYSLLYVQGNERAH | |
| | GQDLGTAGSCLRKFSTMPFLFCNINNVCNFASRNDYSYWLSTPEPM | |
| | PMSMAPITGENIRPFISRCAVCEAPAMVMAVHSQTIQIPPCPSGWSSL | |
| | WIGYSFVMHTSAGAEGSGQALASPGSCLEEFRSAPFIECHGRGTCNY | |
| | YANAYSFWLATIERSEMFKKPTPSTLKAGELRTHVSRCQVCMRRT | |
| 394 | MRLLAKIICLMLWAICVAEDCNELPPRRNTEILTGSWSDQTYPEGTQ | CFH |
| | AIYKCRPGYRSLGNVIMVCRKGEWVALNPLRKCQKRPCGHPGDTP | |
| | FGTFTLTGGNVFEYGVKAVYTCNEGYQLLGEINYRECDTDGWTNDI | |
| | PICEVVKCLPVTAPENGKIVSSAMEPDREYHFGQAVRFVCNSGYKIE | |
| | GDEEMHCSDDGFWSKEKPKCVEISCKSPDVINGSPISQKIIYKENERF | |
| | QYKCNMGYEYSERGDAVCTESGWRPLPSCEEKSCDNPYIPNGDYSP | |
| | LRIKHRTGDEITYQCRNGFYPATRGNTAKCTSTGWIPAPRCTLKPCD | |
| | YPDIKHGGLYHENMRRPYFPVAVGKYYSYYCDEHFETPSGSYWDH | |
| | IHCTQDGWSPAVPCLRKCYFPYLENGYNQNYGRKFVQGKSIDVAC | |
| | HPGYALPKAQTTVTCMENGWSPTPRCIRVKTCSKSSIDIENGFISESQ | |
| | YTYALKEKAKYQCKLGYVTADGETSGSITCGKDGWSAQPTCIKSC | |
| | DIPVFMNARTKNDFTWFKLNDTLDYECHDGYESNTGSTTGSIVCGY | |
| | NGWSDLPICYERECELPKIDVHLVPDRKKDQYKVGEVLKFSCKPGF | |
| | TIVGPNSVQCYHFGLSPDLPICKEQVQSCGPPPELLNGNVKEKTKEE | |
| | YGHSEVVEYYCNPRFLMKGPNKIQCVDGEWTTLPVCIVEESTCGDI | |
| | PELEHGWAQLSSPPYYYGDSVEFNCSESFTMIGHRSITCIHGVWTQL | |
| | PQCVAIDKLKKCKSSNLIILEEHLKNKKEFDHNSNIRYRCRGKEGWI | |
| | HTVCINGRWDPEVNCSMAQIQLCPPPPQIPNSHNMTTTLNYRDGEK | |
| | VSVLCQENYLIQEGEEITCKDGRWQSIPLCVEKIPCSQPPQIEHGTINS | |
| | SRSSQESYAHGTKLSYTCEGGFRISEENETTCYMGKWSSPPQCEGLP | |
| | CKSPPEISHGVVAHMSDSYQYGEEVTYKCFEGFGIDGPAIAKCLGEK | |
| | WSHPPSCIKTDCLSLPSFENAIPMGEKKDVYKAGEQVTYTCATYYK | |
| | MDGASNVTCINSRWTGRPTCRDTSCVNPPTVQNAYIVSRQMSKYPS | |
| | GERVRYQCRSP | |
| | YEMFGDEEVMCLNGNWTEPPQCKDSTGKCGPPPPIDNGDITSFPLSV | |
| | YAPASSVEYQCQNLYQLEGNKRITCRNGQWSEPPKCLHPCVISREIM | |
| | ENYNIALRWTAKQKLYSRTGESVEFVCKRGYRLSSRSHTLRTTCWD | |
| | GKLEYPTCAKR | |
| 395 | MEPRPTAPSSGAPGLAGVGETPSAAALAAARVELPGTAVPSVPEDA | SLC12A2 |
| | APASRDGGGVRDEGPAAAGDGLGRPLGPTPSQSRFQVDLVSENAG | |
| | RAAAAAAAAAAAAAAAGAGAGAKQTPADGEASGESEPAKGSEEA | |
| | KGRFRVNFVDPAASSSAEDSLSDAAGVGVDGPNVSFQNGGDTVLSE | |
| | GSSLHSGGGGGSGHHQHYYYDTHTNTYYLRTFGHNTMDAVPRIDH | |
| | YRHTAAQLGEKLLRPSLAELHDELEKEPFEDGFANGEESTPTRDAV | |
| | VTYTAESKGVVKFGWIKGVLVRCMLNIWGVMLFIRLSWIVGQAGI | |
| | GLSVLVIMMATVVTTITGLSTSAIATNGFVRGGGAYYLISRSLGPEF | |
| | GGAIGLIFAFANAVAVAMYVVGFAETVVELLKEHSILMIDEINDIRII | |
| | GAITVVILLGISVAGMEWEAKAQIVLLVILLLAIGDFVIGTFIPLESKK | |
| | PKGFFGYKSEIFNENFGPDFREEETFFSVFAIFFPAATGILAGANISGD | |
| | LADPQSAIPKGTLLAILITTLVYVGIAVSV | |
| | GSCVVRDATGNVNDTIVTELTNCTSAACKLNFDFSSCESSPCSYGL | |
| | MNNFQVMSMVSGFTPLISAGIFSATLSSALASLVSAPKIFQALCKDNI | |
| | YPAFQMFAKGYGKNNEPLRGYILTFLIALGFILIAELNVIAPIISNFFL | |
| | ASYALINFSVFHASLAKSPGWRPAFKYYNMWISLLGAILCCIVMFVI | |
| | NWWAALLTYVIVLGLYIYVTYKKPDVNWGSSTQALTYLNALQHSI | |
| | RLSGVEDHVKNFRPQCLVMTGAPNSRPALLHLVHDFTKNVGLMIC | |
| | GHVHMGPRRQAMKEMSIDQAKYQRWLIKNKMKAFYAPVHADDL | |
| | REGAQYLMQAAGLGRMKPNTLVLGFKKDWLQADMRDVDMYINL | |
| | FHDAFDIQYGVVVIRLKEGLDISHLQGQEELLSSQEKSPGTKDVVVS | |
| | VEYSKKSDLDTSKPLSEKPITHKVEEEDGKTATQPLLKKESKGPIVPL | |
| | NVADQKLLEASTQFQKKQGKNTIDVWWLFDDGGLTLLIPYLLTTK | |
| | KKWKDCKIRVFIGGKINRIDHDRRAMATLLSKFRIDFSDIMVLGDIN | |
| | TKPKKENIIAFEEIIEPYRLHEDDKEQDIADKMKEDEPWRITDNELEL | |
| | YKTKTYRQIRLNELLKEHSSTANIIVMSLPVARKGAVSSALYMAWL | |
| | EALSKDLPPILLVRGNHQSVLTFYS | |
| 396 | MAASKKAVLGPLVGAVDQGTSSTRFLVFNSKTAELLSHHQVEIKQE | GK |
| | FPREGWVEQDPKEILHSVYECIEKTCEKLGQLNIDISNIKAIGVSNQR | |
| | ETTVVWDKITGEPLYNAVVWLDLRTQSTVESLSKRIPGNNNFVKSK | |
| | TGLPLSTYFSAVKLRWLLDNVRKVQKAVEEKRALFGTIDSWLIWSL | |
| | TGGVNGGVHCTDVTNASRTMLFNIHSLEWDKQLCEFFGIPMEILPN | |
| | VRSSSEIYGLMKISHSVKAGALEGVPISGCLGDQSAALVGQMCFQIG | |
| | QAKNTYGTGCFLLCNTGHKCVFSDHGLLTTVAYKLGRDKPVYYAL | |
| | EGSVAIAGAVIRWLRDNLGIIKTSEEIEKLAKEVGTSYGCYFVPAFSG | |
| | LYAPYWEPSARGIICGLTQFTNKCHIAFAALEAVCFQTREILDAMNR | |
| | DCGIPLSHLQVDGGMTSNKILMQLQADILYIPVVKPSMPETTALGAA | |
| | MAAGAAEGVGVWSLEPEDLSAVTMERFEPQINAEESEIRYSTWKK | |
| | AVMKSMGWVTTQSPESGDPSIFCSLPLGF | |
| | FIVSSMVMLIGARYISGIP | |
| 397 | MDVGSKEVLMESPPDYSAAPRGRFGIPCCPVHLKRLLIVVVVVVLIV | SFTPC |
| | VVIVGALLMGLHMSQKHTEMVLEMSIGAPEAQQRLALSEHLVTTA | |
| | TFSIGSTGLVVYDYQQLLIAYKPAPGTCCYIMKIAPESIPSLEALNRK | |
| | VHNFQMECSLQAKPAVPTSKLGQAEGRDAGSAPSGGDPAFLGMAV | |
| | NTLCGEVPLYYI | |
| 398 | MEPGRRGAAALLALLCVACALRAGRAQYERYSFRSFPRDELMPLES | CRTAP |
| | AYRHALDKYSGEHWAESVGYLEISLRLHRLLRDSEAFCHRNCSAAP | |
| | QPEPAAGLASYPELRLFGGLLRRAHCLKRCKQGLPAFRQSQPSREV | |
| | LADFQRREPYKFLQFAYFKANNLPKAIAAAHTFLLKHPDDEMMKR | |
| | NMAYYKSLPGAEDYIKDLETKSYESLFIRAVRAYNGENWRTSITDM | |
| | ELALPDFFKAFYECLAACEGSREIKDFKDFYLSIADHYVEVLECKIQ | |
| | CEENLTPVIGGYPVEKFVATMYHY | |
| | LQFAYYKLNDLKNAAPCAVSYLLFDQNDKVMQQNLVYYQYHRDT | |
| | WGLSDEHFQPRPEAVQFFNVTTLQKELYDFAKENIMDDDEGEVVE | |
| | YVDDLLELEETS | |
| 399 | MAVRALKLLTTLLAVVAAASQAEVESEAGWGMVTPDLLFAEGTA | P3H1 |
| | AYARGDWPGVVLSMERALRSRAALRALRLRCRTQCAADFPWELDP | |
| | DWSPSPAQASGAAALRDLSFFGGLLRRAACLRRCLGPPAAHSLSEE | |
| | MELEFRKRSPYNYLQVAYFKINKLEKAVAAAHTFFVGNPEHMEMQ | |
| | QNLDYYQTMSGVKEADFKDLETQPHMQEFRLGVRLYSEEQPQEAV | |
| | PHLEAALQEYFVAYEECRALCEGPYDYDGYNYLEYNADLFQAITD | |
| | HYIQVLNCKQNCVTELASHPSREKPFEDFLPSHYNYLQFAYYNIGN | |
| | YTQAVECAKTYLLFFPNDEVMNQNLAYYAAMLGEEHTRSIGPRES | |
| | AKEYRQRSLLEKELLFFAYDVFGIPFVDPDSWTPEEVIPKRLQEKQK | |
| | SERETAVRISQEIGNLMKEIETLVEEKTKESLDVSRLTREGGPLLYEG | |
| | ISLTMNSKLLNGSQRVVMDGVISDHECQELQRLTNVAATSGDGYR | |
| | GQTSPHTPNEKFYGVTVFKALKLGQEGKVPLQSAHLYYNVTEKVR | |
| | RIMESYFRLDTPLYFSYSHLVCRTAIEEVQAERKDDSHPVHVDNCIL | |
| | NAETLVCVKEPPAYTFRDYSAILYLNGDFDGGNFYFTELDAKTVTA | |
| | EVQPQCGRAVGFSSGTENPHGVKAVTRGQRCAIALWFTLDPRHSER | |
| | DRVQADDLVKMLFSPEEMDLSQEQPLDAQQGPPEPAQESLSGSESK | |
| | PKDEL | |
| 400 | MTLRLLVAALCAGILAEAPRVRAQHRERVTCTRLYAADIVFLLDGS | COL7A1 |
| | SSIGRSNFREVRSFLEGLVLPFSGAASAQGVRFATVQYSDDPRTEFG | |
| | LDALGSGGDVIRAIRELSYKGGNTRTGAAILHVADHVFLPQLARPG | |
| | VPKVCILITDGKSQDLVDTAAQRLKGQGVKLFAVGIKNADPEELKR | |
| | VASQPTSDFFFFVNDFSILRTLLPLVSRRVCTTAGGVPVTRPPDDSTS | |
| | APRDLVLSEPSSQSLRVQWTAASGPVTGYKVQYTPLTGLGQPLPSE | |
| | RQEVNVPAGETSVRLRGLRPLTEYQVTVIALYANSIGEAVSGTARTT | |
| | ALEGPELTIQNTTAHSLLVAWRSVPGATGYRVTWRVLSGGPTQQQE | |
| | LGPGQGSVLLRDLEPGTDYEVTVSTLFGRSVGPATSLMARTDASVE | |
| | QTLRPVILGPTSILLSWNLVPEARGYRLEWRRETGLEPPQKVVLPSD | |
| | VTRYQLDGLQPGTEYRLTLYTLLEGHEVATPATVVPTGPELPVSPVT | |
| | DLQATELPGQRVRVSWSPVPGATQYRII | |
| | VRSTQGVERTLVLPGSQTAFDLDDVQAGLSYTVRVSARVGPREGSA | |
| | SVLTVRREPETPLAVPGLRVVVSDATRVRVAWGPVPGASGFRISWS | |
| | TGSGPESSQTLPPDSTATDITGLQPGTTYQVAVSVLRGREEGPAAVI | |
| | VARTDPLGPVRTVHVTQASSSSVTITWTRVPGATGYRVSWHSAHGP | |
| | EKSQLVSGEATVAELDGLEPDTEYTVHVRAHVAGVDGPPASVVVR | |
| | TAPEPVGRVSRLQILNASSDVLRITWVGVTGATAYRLAWGRSEGGP | |
| | MRHQILPGNTDSAEIRGLEGGVSY | |
| | SVRVTALVGDREGTPVSIVVTTPPEAPPALGTLHVVQRGEHSLRLR | |
| | WEPVPRAQGFLLHWQPEGGQEQSRVLGPELSSYHLDGLEPATQYR | |
| | VRLSVLGPAGEGPSAEVTARTESPRVPSIELRVVDTSIDSVTLAWTP | |
| | VSRASSYILSWRPLRGPGQEVPGSPQTLPGISSSQRVTGLEPGVSYIFS | |
| | LTPVLDGVRGPEASVTQTPVCPRGLADVVFLPHATQDNAHRAEATR | |
| | RVLERLVLALGPLGPQAVQVGLLSYSHRPSPLFPLNGSHDLGIILQRI | |
| | RDMPYMDPSGNNLGTAVVTAHRYMLAPDAPGRRQHVPGVMVLLV | |
| | DEPLRGDIFSPIREAQASGLNVVMLGMAGADPEQLRRLAPGMDSVQ | |
| | TFFAVDDGPSLDQAVSGLATALCQASFTTQPRPEPCPVYCPKGQKG | |
| | EPGEMGLRGQVGPPGDPGLPGRTGAPGPQGPPGSATAKGERGFPGA | |
| | DGRPGSPGRAGNPGTPGAPGLKGSPGLPGPRGDPGERGPRGPKGEP | |
| | GAPGQVIGGEGPGLPGRKGDPGPSGPPGPRGPLGDPGPRGPPGLPGT | |
| | AMKGDKGDRGERGPPGPGEGGIAPGEPGLPGLPGSPGPQGPVGPPG | |
| | KKGEKGDSEDGAPGLPGQPGSPGEQGPRGPPGAIGPKGDRGFPGPL | |
| | GEAGEKGERGPPGPAGSRGLPGVAGRPGAKGPEGPPGPTGRQGEKG | |
| | EPGRPGDPAVVGPAVAGPKGEKGDVGPAGPRGATGVQGERGPPGL | |
| | VLPGDPGPKGDPGDRGPIGLTGRAGPPGDSGPPGEKGDPGRPGPPGP | |
| | VGPRGRDGEVGEKGDEGPPGDPGLPGKAGERGLRGAPGVRGPVGE | |
| | KGDQGDPGEDGRNGSPGSSGPKGDRGEPGPPGPPGRLVDTGPGARE | |
| | KGEPGDRGQEGPRGPKGDPGLPGAPGERGIEGFRGPPGPQGDPGVR | |
| | GPAGEKGDRGPPGLDGRSGLDGKPGAAGPSGPNGAAGKAGDPGRD | |
| | GLPGLRGEQGLPGPSGPPGLPGKPGEDGKPGLNGKNGEPGDPGEDG | |
| | RKGEKGDSGASGREGRDGPKGERGAPGILGPQGPPGLPGPVGPPGQ | |
| | GFPGVPGGTGPKGDRGETGSKGEQGLPGERGLRGEPGSVPNVDRLL | |
| | ETAGIKASALREIVETWDESSGSFLPVPERRRGPKGDSGEQGPPGKE | |
| | GPIGFPGERGLKGDRGDPGPQGPPGLALGERGPPGPSGLAGEPGKPG | |
| | IPGLPGRAGGVGEAGRPGERGERGEKGERGEQGRDGPPGLPGTPGP | |
| | PGPPGPKVSVDEPGPGLSGEQGPPGLKGAKGEPGSNGDQGPKGDRG | |
| | VPGIKGDRGEPGPRGQDGNPGLPGERGMAGPEGKPGLQGPRGPPGP | |
| | VGGHGDPGPPGAPGLAGPAGPQGPSGLKGEPGETGPPGRGLTGPTG | |
| | AVGLPGPPGPSGLVGPQGSPGLPGQVGETGKPGAPGRDGASGKDG | |
| | DRGSPGVPGSP | |
| | GLPGPVGPKGEPGPTGAPGQAVVGLPGAKGEKGAPGGLAGDLVGE | |
| | PGAKGDRGLPGPRGEKGEAGRAGEPGDPGEDGQKGAPGPKGFKGD | |
| | PGVGVPGSPGPPGPPGVKGDLGLPGLPGAPGVVGFPGQTGPRGEMG | |
| | QPGPSGERGLAGPPGREGIPGPLGPPGPPGSVGPPGASGLKGDKGDP | |
| | GVGLPGPRGERGEPGIRGEDGRPGQEGPRGLTGPPGSRGERGEKGD | |
| | VGSAGLKGDKGDSAVILGPPGPRGAKGDMGERGPRGLDGDKGPRG | |
| | DNGDPGDKGSKGEPGDKGSAGLPGLRGLLGPQGQPGAAGIPGDPGS | |
| | PGKDGVPGIRGEKGDVGFMGPRGLKGERGVKGACGLDGEKGDKG | |
| | EAGPPGRPGLAGHKGEMGEPGVPGQSGAPGKEGLIGPKGDRGFDG | |
| | QPGPKGDQGEKGERGTPGIGGFPGPSGNDGSAGPPGPPGSVGPRGPE | |
| | GLQGQKGERGPPGERVVGAPGVPGAPGERGEQGRPGPAGPRGEKG | |
| | EAALTEDDIRGFVRQEMSQHCACQGQFIASGSRPLPSYAADTAGSQ | |
| | LHAVPVLRVSHAEEEERVPPEDDEYSEYSEYSVEEYQDPEAPWDSD | |
| | DPCSLPLDEGSCTAYTLRWYHRAVTGSTEACHPFVYGGCGGNANR | |
| | FGTREACERRCPPRVVQSQGTGTAQD | |
| 401 | MSIQENISSLQLRSWVSKSQRDLAKSILIGAPGGPAGYLRRASVAQL | PKLR |
| | TQELGTAFFQQQQLPAAMADTFLEHLCLLDIDSEPVAARSTSIIATIG | |
| | PASRSVERLKEMIKAGMNIARLNFSHGSHEYHAESIANVREAVESFA | |
| | GSPLSYRPVAIALDTKGPEIRTGILQGGPESEVELVKGSQVLVTVDPA | |
| | FRTRGNANTVWVDYPNIVRVVPVGGRIYIDDGLISLVVQKIGPEGLV | |
| | TQVENGGVLGSRKGVNLPGAQVDLPGLSEQDVRDLRFGVEHGVDI | |
| | VFASFVRKASDVAAVRAALGPEGHGIKIISKIENHEGVKRFDEILEVS | |
| | DGIMVARGDLGIEIPAEKVFLAQKMMIGRCNLAGKPVVCATQMLES | |
| | MITKPRPTRAETSDVANAVLDGADCIMLSGETAKGNFPVEAVKMQ | |
| | HAIAREAEAAVYHRQLFEELRRAAPLSRDPTEVTAIGAVEAAFKCC | |
| | AAAIIVLTTTGRSAQLLSRYRPRAAVIAVTRSAQAARQVHLCRGVFP | |
| | LLYREPPEAIWADDVDRRVQFGIESG | |
| | KLRGFLRVGDLVIVVTGWRPGSGYTNIMRVLSIS | |
| 402 | MSSPVKRQRMESALDQLKQFTTVVADTGDFHAIDEYKPQDATTNP | TALDO1 |
| | SLILAAAQMPAYQELVEEAIAYGRKLGGSQEDQIKNAIDKLFVLFGA | |
| | EILKKIPGRVSTEVDARLSFDKDAMVARARRLIELYKEAGISKDRILI | |
| | KLSSTWEGIQAGKELEEQHGIHCNMTLLFSFAQAVACAEAGVTLISP | |
| | FVGRILDWHVANTDKKSYEPLEDPGVKSVTKIYNYYKKFSYKTIVM | |
| | GASFRNTGEIKALAGCDFLTISPKLLGELLQDNAKLVPVLSAKAAQA | |
| | SDLEKIHLDEKSFRWLHNEDQMAVEKLSDGIRKFAADAVKLERML | |
| | TERMFNAENGK | |
| 403 | MRLAVGALLVCAVLGLCLAVPDKTVRWCAVSEHEATKCQSFRDH | TF |
| | MKSVIPSDGPSVACVKKASYLDCIRAIAANEADAVTLDAGLVYDAY | |
| | LAPNNLKPVVAEFYGSKEDPQTFYYAVAVVKKDSGFQMNQLRGK | |
| | KSCHTGLGRSAGWNIPIGLLYCDLPEPRKPLEKAVANFFSGSCAPCA | |
| | DGTDFPQLCQLCPGCGCSTLNQYFGYSGAFKCLKDGAGDVAFVKH | |
| | STIFENLANKADRDQYELLCLDNTRKPVDEYKDCHLAQVPSHTVVA | |
| | RSMGGKEDLIWELLNQAQEHFGKDKSKEFQLFSSPHGKDLLFKDSA | |
| | HGFLKVPPRMDAKMYLGYEYVTAIRNLREGTCPEAPTDECKP | |
| | VKWCALSHHERLKCDEWSVNSVGKIECVSAETTEDCIAKIMNGEA | |
| | DAMSLDGGFVYIAGKCGLVPVLAENYNKSDNCEDTPEAGYFAIAV | |
| | VKKSASDLTWDNLKGKKSCHTAVGRTAGWNIPMGLLYNKINHCRF | |
| | DEFFSEGCAPGSKKDSSLCKLCMGSGLNLCEPNNKEGYYGYTGAFR | |
| | CLVEKGDVAFVKHQTVPQNTGGKNPDPWAKNLNEKDYELLCLDG | |
| | TRKPVEEYANCHLARAPNHAVVTRKDKEACVHKILRQQQHLFGSN | |
| | VTDCSGNFCLFRSETKDLLFRDDTVCLAKLHDRNTYEKYLGEEYVK | |
| | AVGNLRKCSTSSLLEACTFRRP | |
| 404 | MAPPQVLAFGLLLAAATATFAAAQEECVCENYKLAVNCFVNNNRQ | EPCAM |
| | CQCTSVGAQNTVICSKLAAKCLVMKAEMNGSKLGRRAKPEGALQN | |
| | NDGLYDPDCDESGLFKAKQCNGTSMCWCVNTAGVRRTDKDTEITC | |
| | SERVRTYWIIIELKHKAREKPYDSKSLRTALQKEITTRYQLDPKFITSI | |
| | LYENNVITIDLVQNSSQKTQNDVDIADVAYYFEKDVKGESLFHSKK | |
| | MDLTVNGEQLDLDPGQTLIYYVDEKAPEFSMQGLKAGVIAVIVVVV | |
| | IAVVAGIVVLVISRKKRMAKYEKA | |
| | EIKEMGEMHRELNA | |
| 405 | MPRRAENWDEAEVGAEEAGVEEYGPEEDGGEESGAEESGPEESGPE | VHL |
| | ELGAEEEMEAGRPRPVLRSVNSREPSQVIFCNRSPRVVLPVWLNFD | |
| | GEPQPYPTLPPGTGRRIHSYRGHLWLFRDAGTHDGLLVNQTELFVPS | |
| | LNVDGQPIFANITLPVYTLKERCLQVVRSLVKPENYRRLDIVRSLYE | |
| | DLEDHPNVQKDLERLTQERIAHQRMGD | |
| 406 | MKRVLVLLLAVAFGHALERGRDYEKNKVCKEFSHLGKEDFTSLSL | GC |
| | VLYSRKFPSGTFEQVSQLVKEVVSLTEACCAEGADPDCYDTRTSAL | |
| | SAKSCESNSPFPVHPGTAECCTKEGLERKLCMAALKHQPQEFPTYV | |
| | EPTNDEICEAFRKDPKEYANQFMWEYSTNYGQAPLSLLVSYTKSYL | |
| | SMVGSCCTSASPTVCFLKERLQLKHLSLLTTLSNRVCSQYAAYGEK | |
| | KSRLSNLIKLAQKVPTADLEDVLPLAEDITNILSKCCESASEDCMAK | |
| | ELPEHTVKLCDNLSTKNSKFEDCCQEKTAMDVFVCTYFMPAAQLPE | |
| | LPDVELPTNKDVCDPGNTKVMDKYTFELSRRTHLPEVFLSKVLEPT | |
| | LKSLGECCDVEDSTTCFNAKGPLLKKELSSFIDKGQELCADYSENTF | |
| | TEYKKKLAERLKAKLPDATPTELAKLVNKHSDFASNCCSINSPPLYC | |
| | DSEIDAELKNIL | |
| 407 | MPSSVSWGILLLAGLCCLVPVSLAEDPQGDAAQKTDTSHHDQDHPT | SERPINA1 |
| | FNKITPNLAEFAFSLYRQLAHQSNSTNIFFSPVSIATAFAMLSLGTKA | |
| | DTHDEILEGLNFNLTEIPEAQIHEGFQELLRTLNQPDSQLQLTTGNGL | |
| | FLSEGLKLVDKFLEDVKKLYHSEAFTVNFGDTEEAKKQINDYVEKG | |
| | TQGKIVDLVKELDRDTVFALVNYIFFKGKWERPFEVKDTEEEDFHV | |
| | DQVTTVKVPMMKRLGMFNIQHCKKLSSWVLLMKYLGNATAIFFLP | |
| | DEGKLQHLENELTHDIITKFLENEDRRSASLHLPKLSITGTYDLKSVL | |
| | GQLGITKVFSNGADLSGVTEEAPLKLSKAVHKAVLTIDEKGTEAAG | |
| | AMFLEAIPMSIPPEVKFNKPFVFLMIEQNTKSPLFMGKVVNPTQK | |
| 408 | MAAPAEPCAGQGVWNQTEPEPAATSLLSLCFLRTAGVWVPPMYL | ABCC6 |
| | WVLGPIYLLFIHHHGRGYLRMSPLFKAKMVLGFALIVLCTSSVAVA | |
| | LWKIQQGTPEAPEFLIHPTVWLTTMSFAVFLIHTERKKGVQSSGVLF | |
| | GYWLLCFVLPATNAAQQASGAGFQSDPVRHLSTYLCLSLVVAQFV | |
| | LSCLADQPPFFPEDPQQSNPCPETGAAFPSKATFWWVSGLVWRGYR | |
| | RPLRPKDLWSLGRENSSEELVSRLEKEWMRNRSAARRHNKAIAFKR | |
| | KGGSGMKAPETEPFLRQEGSQWRPLL | |
| | KAIWQVFHSTFLLGTLSLIISDVFRFTVPKLLSLFLEFIGDPKPPAWKG | |
| | YLLAVLMFLSACLQTLFEQQNMYRLKVLQMRLRSAITGLVYRKVL | |
| | ALSSGSRKASAVGDVVNLVSVDVQRLTESVLYLNGLWLPLVWIVV | |
| | CFVYLWQLLGPSALTAIAVFLSLLPLNFFISKKRNHHQEEQMRQKDS | |
| | RARLTSSILRNSKTIKFHGWEGAFLDRVLGIRGQELGALRTSGLLFS | |
| | VSLVSFQVSTFLVALVVFAVHTLVAENAMNAEKAFVTLTVLNILNK | |
| | AQAFLPFSIHSLVQARVSFDRLVTFLCLEEVDPGVVDSSSSGSAAGK | |
| | DCITIHSATFAWSQESPPCLHRINLTVPQGCLLAVVGPVGAGKSSLLS | |
| | ALLGELSKVEGFVSIEGAVAYVPQEAWVQNTSVVENVCFGQELDPP | |
| | WLERVLEACALQPDVDSFPEGIHTSIGEQGMNLSGGQKQRLSLARA | |
| | VYRKAAVYLLDDPLAALDAHVGQHVFNQVIGPGGLLQGTTRILVT | |
| | HALHILPQADWIIVLANGAIAEMGSYQELLQRKGALMCLLDQARQP | |
| | GDRGEGETEPGTSTKDPRGTSAGRRPELRRERSIKSVPEKDRTTSEA | |
| | QTEVPLDDPDRAGWPAGKDSIQYGRVKATVHLAYLRAVGTPLCLY | |
| | ALFLFLCQQVASFCRGYWLSLWADDPAVGGQQTQAALRGGIFGLL | |
| | GCLQAIGLFASMAAVLLGGARASRLLFQRLLWDVVRSPISFFERTPI | |
| | GHLLNRFSKETDTVDVDIPDKLRSLLMYAFGLLEVSLVVAVATPLA | |
| | TVAILPLFLLYAGFQSLYVVSSCQLRRLESASYSSVCSHMAETFQGS | |
| | TVVRAF | |
| | RTQAPFVAQNNARVDESQRISFPRLVADRWLAANVELLGNGLVFA | |
| | AATCAVLSKAHLSAGLVGFSVSAALQVTQTLQWVVRNWTDLENSI | |
| | VSVERMQDYAWTPKEAPWRLPTCAAQPPWPQGGQIEFRDFGLRYR | |
| | PELPLAVQGVSFKIHAGEKVGIVGRTGAGKSSLASGLLRLQEAAEG | |
| | GIWIDGVPIAHVGLHTLRSRISIIPQDPILFPGSLRMNLDLLQEHSDEA | |
| | IWAALETVQLKALVASLPGQLQYKCADRGEDLSVGQKQLLCLARA | |
| | LLRKTQILILDEATAAVDPGTELQM | |
| | QAMLGSWFAQCTVLLIAHRLRSVMDCARVLVMDKGQVAESGSPA | |
| | QLLAQKGLFYRLAQESGLV | |
| 409 | MQIELSTCFFLCLLRFCFSATRRYYLGAVELSWDYMQSDLGELPVD | F8 |
| | ARFPPRVPKSFPFNTSVVYKKTLFVEFTDHLFNIAKPRPPWMGLLGP | |
| | TIQAEVYDTVVITLKNMASHPVSLHAVGVSYWKASEGAEYDDQTS | |
| | QREKEDDKVFPGGSHTYVWQVLKENGPMASDPLCLTYSYLSHVDL | |
| | VKDLNSGLIGALLVCREGSLAKEKTQTLHKFILLFAVFDEGKSWHSE | |
| | TKNSLMQDRDAASARAWPKMHTVNGYVNRSLPGLIGCHRKSVYW | |
| | HVIGMGTTPEVHSIFLEGHTFLVRNHRQASLEISPITFLTAQTLLMDL | |
| | GQFLLFCHISSHQHDGMEAYVKVDSCPEPQLRMKNNEEAEDYDD | |
| | DLTDSEMDVVRFDDDNSPSFIQIRSVAKKHPKTWVHYIAAEEEDWD | |
| | YAPLVLAPDDRSYKSQYLNNGPQRIGRKYKKVRFMAYTDETFKTR | |
| | EAIQHESGILGPLLYGEVGDTLLIIFKNQASRPYNIYPHGITDVRPLYS | |
| | RRLPKGVKHLKDFPILPGEIFKYKWTVTVEDGPTKSDPRCLTRYYSS | |
| | FVNMERDLASGLIGPLLICYKESVDQRGNQIMSDKRNVILFSVFDEN | |
| | RSWYLTENIQRFLPNPAGVQLEDPEFQASNIMHSINGYVFDSLQLSV | |
| | CLHEVAYWYILSIGAQTDFLSVFFSGYTFKHKMVYEDTLTLFPFSGE | |
| | TVFMSMENPGLWILGCHNSDFRNRGMTALLKVSSCDKNTGDYYED | |
| | SYEDISAYLLSKNNAIEPRSFSQNSRHPSTRQKQFNATTIPENDIEKTD | |
| | PWFAHRTPMPKIQNVSSSDLLMLLRQSPTPHGLSLSDLQEAKYETFS | |
| | DDPS | |
| | PGAIDSNNSLSEMTHFRPQLHHSGDMVFTPESGLQLRLNEKLGTTA | |
| | ATELKKLDFKVSSTSNNLISTIPSDNLAAGTDNTSSLGPPSMPVHYDS | |
| | QLDTTLFGKKSSPLTESGGPLSLSEENNDSKLLESGLMNSQESSWGK | |
| | NVSSTESGRLFKGKRAHGPALLTKDNALFKVSISLLKTNKTSNNSAT | |
| | NRKTHIDGPSLLIENSPSVWQNILESDTEFKKVTPLIHDRMLMDKNA | |
| | TALRLNHMSNKTTSSKNMEMVQQKKEGPIPPDAQNPDMSFFKMLF | |
| | LPESARWIQRTHGKNSLNSGQGPSPKQLVSLGPEKSVEGQNFLSEKN | |
| | KVVVGKGEFTKDVGLKEMVFPSSRNLFLTNLDNLHENNTHNQEKK | |
| | IQEEIEKKETLIQENVVLPQIHTVTGTKNFMKNLFLLSTRQNVEGSYD | |
| | GAYAPVLQDFRSNDSTNRTKKHTAHFSKKGEEENLEGLGNQTKQI | |
| | VEKYACTTRISPNTSQQNFVTQRSKRALKQFRLPLEETELEKRIIVDD | |
| | TSTQWSKNMKHLTPSTLTQIDYNEKE | |
| | KGAITQSPLSDCLTRSHSIPQANRSPLPIAKVSSFPSIRPIYLTRVLFQD | |
| | NSSHLPAASYRKKDSGVQESSHFLQGAKKNNLSLAILTLEMTGDQR | |
| | EVGSLGTSATNSVTYKKVENTVLPKPDLPKTSGKVELLPKVHIYQK | |
| | DLFPTETSNGSPGHLDLVEGSLLQGTEGAIKWNEANRPGKVPFLRV | |
| | ATESSAKTPSKLLDPLAWDNHYGTQIPKEEWKSQEKSPEKTAFKKK | |
| | DTILSLNACESNHAIAAINEGQNKPEIEVTWAKQGRTERLCSQNPPV | |
| | LKRHQREITRTTLQSDQEEIDYDDTISVEMKKEDFDIYDEDENQSPR | |
| | SFQKKTRHYFIAAVERLWDYGMSSSPHVLRNRAQSGSVPQFKKVVF | |
| | QEFTDGSFTQPLYRGELNEHLGLLGPYIRAEVEDNIMVTFRNQASRP | |
| | YSFYSSLISYEEDQRQGAEPRKNFVKPNETKTYFWKVQHHMAPTKD | |
| | EFDCKAWAYFSDVDLEKDVHSGLIGPLLVCHTNTLNPAHGRQVTV | |
| | QEFALFFTIFDETKSWYFTENMERNCRA | |
| | PCNIQMEDPTFKENYRFHAINGYIMDTLPGLVMAQDQRIRWYLLSM | |
| | GSNENIHSIHFSGHVFTVRKKEEYKMALYNLYPGVFETVEMLPSKA | |
| | GIVVRVECLIGEHLHAGMSTLFLVYSNKCQTPLGMASGHIRDFQITAS | |
| | GQYGQWAPKLARLHYSGSINAWSTKEPFSWIKVDLLAPMIIHGIKT | |
| | QGARQKFSSLYISQFIIMYSLDGKKWQTYRGNSTGTLMVFFGNVDS | |
| | SGIKHNIFNPPIIARYIRLHPTHYSIRSTLRMELMGCDLNSCSMPLGM | |
| | ESKAISDAQITASSYFTNMFATWSPSKARLHLQGRSNAWRPQVNNP | |
| | KEWLQVDFQKTMKVTGVTTQGVKSLLTSMYVKEFLISSSQDGHQW | |
| | TLFFQNGKVKVFQGNQDSFTPVVNSLDPPLLTRYLRIHPQSWVHQIA | |
| | LRMEVLGCEAQDLY | |
| 410 | MQRVNMIMAESPGLITICLLGYLLSAECTVFLDHENANKILNRPKRY | F9 |
| | NSGKLEEFVQGNLERECMEEKCSFEEAREVFENTERTTEFWKQYVD | |
| | GDQCESNPCLNGGSCKDDINSYECWCPFGFEGKNCELDVTCNIKNG | |
| | RCEQFCKNSADNKVVCSCTEGYRLAENQKSCEPAVPFPCGRVSVSQ | |
| | TSKLTRAETVFPDVDYVNSTEAETILDNITQSTQSFNDFTRVVGGED | |
| | AKPGQFPWQVVLNGKVDAFCGGSIVNEKWIVTAAHCVETGVKITV | |
| | VAGEHNIEETEHTEQKRNVIRII | |
| | PHHNYNAAINKYNHDIALLELDEPLVLNSYVTPICIADKEYTNIFLKF | |
| | GSGYVSGWGRVFHKGRSALVLQYLRVPLVDRATCLRSTKFTIYNN | |
| | MFCAGFHEGGRDSCQGDSGGPHVTEVEGTSFLTGIISWGEECAMKG | |
| | KYGIYTKVSRYVNwIKEKTKLT | |
| 411 | MDPPRPALLALLALPALLLLLLAGARAEEEMLENVSLVCPKDATRF | ApoB |
| | KHLRKYTYNYEAESSSGVPGTADSRSATRINCKVELEVPQLCSFILK | |
| | TSQCTLKEVYGFNPEGKALLKKTKNSEEFAAAMSRYELKLAIPEGK | |
| | QVFLYPEKDEPTYILNIKRGIISALLVPPETEEAKQVLFLDTVYGNCS | |
| | THFTVKTRKGNVATEISTERDLGQCDRFKPIRTGISPLALIKGMTRPL | |
| | STLIS | |
| | SSQSCQYTLDAKRKHVAEAICKEQHLFLPFSYKNKYGMVAQVTQT | |
| | LKLEDTPKINSRFFGEGTKKMGLAFESTKSTSPPKQAEAVLKTLQEL | |
| | KKLTISEQNIQRANLFNKLVTELRGLSDEAVTSLLPQLIEVSSPITLQA | |
| | LVQCGQPQCSTHILQWLKRVHANPLLIDVVTYLVALIPEPSAQQLRE | |
| | IFNMARDQRSRATLYALSHAVNNYHKTNPTGTQELLDIANYLMEQI | |
| | QDDCTGDEDYTYLILRVIGNMGQTMEQLTPELKSSILKCVQSTKPSL | |
| | MIQKAAIQALRKMEPKDKD | |
| | QEVLLQTFLDDASPGDKRLAAYLMLMRSPSQAINKIVQILPWEQNE | |
| | QVKNFVASHIANILNSEELDIQDLKKLVKEALKESQLPTVMDFRKFS | |
| | RNYQLYKSVSLPSLDPASAKIEGNLIFDPNNYLPKESMLKTTLTAFG | |
| | FASADLIEIGLEGKGFEPTLEALFGKQGFFPDSVNKALYWVNGQVP | |
| | DGVSKVLVDHFGYTKDDKHEQDMVNGIMLSVEKLIKDLKSKEVPE | |
| | ARAYLRILGEELGFASLHDLQLLGKLLLMGARTLQGIPQMIGEVIRK | |
| | GSKNDFFLHYIFMENAFELPTGAGLQLQISSSGVIAPGAKAGVKLEV | |
| | ANMQAELVAKPSVSVEFVTNMGIIIPDFARSGVQMNTNFFHESGLE | |
| | AHVALKAGKLKFIIPSPKRPVKLLSGGNTLHLVSTTKTEVIPPLIENR | |
| | QSWSVCKQVFPGLNYCTSGAYSNASSTDSASYYPLTGDTRLELELR | |
| | PTGEIEQYSVSATYELQREDRALVDTLKFVTQAEGAKQTEATMTFK | |
| | YNRQSMTLSSEVQIPDFDVDLGTILRVN | |
| | DESTEGKTSYRLTLDIQNKKITEVALMGHLSCDTKEERKIKGVISIPR | |
| | LQAEARSEILAHWSPAKLLLQMDSSATAYGSTVSKRVAWHYDEEKI | |
| | EFEWNTGTNVDTKKMTSNFPVDLSDYPKSLHMYANRLLDHRVPQT | |
| | DMTFRHVGSKLIVAMSSWLQKASGSLPYTQTLQDHLNSLKEFNLQ | |
| | NMGLPDFHIPENLFLKSDGRVKYTLNKNSLKIEIPLPFGGKSSRDLK | |
| | MLETVRTPALHFKSVGFHLPSREFQVPTFTIPKLYQLQVPLLGVLDL | |
| | STNVYSNLYNWSASYSGGNTST | |
| | DHFSLRARYHMKADSVVDLLSYNVQGSGETTYDHKNTFTLSYDGS | |
| | LRHKFLDSNIKFSHVEKLGNNPVSKGLLIFDASSSWGPQMSASVHLD | |
| | SKKKQHLFVKEVKIDGQFRVSSFYAKGTYGLSCQRDPNTGRLNGES | |
| | NLRFNSSYLQGTNQITGRYEDGTLSLTSTSDLQSGIIKNTASLKYENY | |
| | ELTLKSDTNGKYKNFATSNKMDMTFSKQNALLRSEYQADYESLRF | |
| | FSLLSGSLNSHGLELNADILGTDKINSGAHKATLRIGQDGISTSATTN | |
| | LKCSLLVLENELNAELGLSGASMKLTTNGRFREHNAKFSLDGKAAL | |
| | TELSLGSAYQAMILGVDSKNIFNFKVSQEGLKLSNDMMGSYAEMK | |
| | FDHTNSLNIAGLSLDFSSKLDNIYSSDKFYKQTVNLQLQPYSLVTTL | |
| | NSDLKYNALDLTNNGKLRLEPLKLHVAGNLKGAYQNNEIKHIYAIS | |
| | SAALSASYKADTVAKVQGVEFSHRLNTDIAGLASAIDMSTNYNSDS | |
| | LHFSNVFRSVMAPFTMTIDAHTNGNGKLALWGEHTGQLYSKFLLK | |
| | AEPLAFTFSHDYKGSTSHHLVSRKSISAALEHKVSALLTPAEQTGTW | |
| | KLKTQFNNNEYSQDLDAYNTKDKIGVELTGRTLADLTLLDSPIKVPL | |
| | LLSEPINIIDALEMRDAVEKPQEFTIVAFVKYDKNQDVHSINLPFFET | |
| | LQEYFERNRQTIIVVLENVQRNLKHINIDQFVRKYRAALGKLPQQA | |
| | NDYLNSFNWERQVSHAKEKLTALTKKYRITENDIQIALDDAKINFNE | |
| | KLSQLQTYMIQFDQYIKDSYDLHDLKIAIANIIDEIIEKLKSLDEHYHI | |
| | RVNLVKTIHDLHLFIENIDFNKSGSSTASWIQNVDTKYQIRIQIQEKL | |
| | QQLKRHIQNIDIQHLAGKLKQHIEAIDVRVLLDQLGTTISFERINDILE | |
| | HVKHFVINLIGDFEVAEKINAFRAKVHELIERYEVDQQIQVLMDKLV | |
| | ELAHQYKLKETIQKLSNVLQQVKIKDYFEKLVGFIDDAVKKLNELSF | |
| | KTFIEDVNKFLDMLIKKLKSFDYHQFVDETNDKIREVTQRLNGEIQA | |
| | LELPQKAEALKLFLEETKATVAVYLESLQDTKITLIINWLQEALSSAS | |
| | LAHMKAKFRETLEDTRDRMYQMDIQQELQRYLSLVGQVYSTLVTY | |
| | ISDWWTLAAKNLTDFAEQYSIQDWAKRMKALVEQGFTVPEIKTILG | |
| | TMPAFEVSLQALQKATFQTPDFIVPLTDLRIPSVQINFKDLKNIKIPSR | |
| | FSTPEFTILNTFHIPSFTIDFVEMKVKIIRTIDQMLNSELQWPVPDIYLR | |
| | DLKVEDIPLARITLPDFRLPEIAIPEFIIPTLNLNDFQVPDLHIPEFQLPH | |
| | ISHTIEVPTFGKLYSILKIQSPLFTLDANADIGNGTTSANEAGIAASITA | |
| | KGESKLEVLNFDFQANAQLSNPKINPLALKESVKFSSKYLRTEHGSE | |
| | MLFFGNAIEGKSNTVASLHTEKNTLELSNGVIVKINNQLTLDSNTKY | |
| | FHKLNIPKLDFSSQADLRNEIKTLLKAGHIAWTSSGKGSWKWACPR | |
| | FSDEGTHESQISFTIEGPLTSFGLSNKINSKHLRVNQNLVYESGSLNFS | |
| | KLEIQSQVDSQHVGHSVLTAKGMALFGEGKAEFTGRHDAHLNGKV | |
| | IGTLKNSLFFSAQPFEITASTNNEGNLKVRFPLRLTGKIDFLNNYALF | |
| | LSPSAQQASWQVSARFNQYKYNQNFSAGNNENIMEAHVGINGE | |
| | ANLDFLNIPLTIPEMRLPYTIITTPPLKDFSLWEKTGLKEFLKTTKQSF | |
| | DLSVKAQYKKNKHRHSITNPLAVLCEFISQSIKSFDRHFEKNRNNAL | |
| | DFVTKSYNETKIKFDKYKAEKSHDELPRTFQIPGYTVPVVNVEVSPF | |
| | TIEMSAFGYVFPKAVSMPSFSILGSDVRVPSYTLILPSLELPVLHVPR | |
| | NLKLSLPDFKELCTISHIFIPAMGNITYDFSFKSSVITLNTNAELFNQS | |
| | DIVAHLLSSSSSVIDALQYKLEGTTRLTRKRGLKLATALSLSNKFVE | |
| | GSHNSTVSLTTKNMEVSVATTTKAQIPILRMNFKQELNGNTKSKPT | |
| | VSSSMEFKYDFNSSMLYSTAKGAVDHKLSLESLTSYFSIESSTKGDV | |
| | KGSVLSREYSGTIASEANTYLNSKSTRSSVKLQGTSKIDDIWNLEVK | |
| | ENFAGEATLQRIYSLWEHSTKNHLQLEGLFFTNGEHTSKATLELSPW | |
| | QMSALV | |
| | QVHASQPSSFHDFPDLGQEVALNANTKNQKIRWKNEVRIHSGSFQS | |
| | QVELSNDQEKAHLDIAGSLEGHLRFLKNIILPVYDKSLWDFLKLDVT | |
| | TSIGRRQHLRVSTAFVYTKNPNGYSFSIPVKVLADKFIIPGLKLNDLN | |
| | SVLVMPTFHVPFTDLQVPSCKLDFREIQIYKKLRTSSFALNLPTLPEV | |
| | KFPEVDVLTKYSQPEDSLIPFFEITVPESQLTVSQFTLPKSVSDGIAAL | |
| | DL | |
| | NAVANKIADFELPTIIVPEQTIEIPSIKFSVPAGIVIPSFQALTARFEVDS | |
| | PVYNATWSASLKNKADYVETVLDSTCSSTVQFLEYELNVLGTHKIE | |
| | DGTLASKTKGTFAHRDFSAEYEEDGKYEGLQEWEGKAHLNIKSPAF | |
| | TDLHLRYQKDKKGISTSAASPAVGTVGMDMDEDDDFSKWNFYYSP | |
| | QSSPDKKLTIFKTELRVRESDEETQIKVNWEEEAASGLLTSLKDNVP | |
| | KATGVLYDYVNKYHWEHTGLTLREVSSKLRRNLQNNAEWVYQGA | |
| | IRQIDDIDVRFQKAASGTTGT | |
| | YQEWKDKAQNLYQELLTQEGQASFQGLKDNVFDGLVRVTQEFHM | |
| | KVKHLIDSLIDFLNFPRFQFPGKPGIYTREELCTMFIREVGTVLSQVY | |
| | SKVHNGSEILFSYFQDLVITLPFELRKHKLIDVISMYRELLKDLSKEA | |
| | QEVFKAIQSLKTTEVLRNLQDLLQFIFQLIEDNIKQLKEMKFTYLINY | |
| | IQDEINTIFSDYIPYVFKLLKENLCLNLHKFNEFIQNELQEASQELQQI | |
| | HQY | |
| | IMALREEYFDPSIVGWTVKYYELEEKIVSLIKNLLVALKDFHSEYIVS | |
| | ASNFTSQLSSQVEQFLHRNIQEYLSILTDPDGKGKEKIAELSATAQEII | |
| | KSQAIATKKIISDYHQQFRYKLQDFSDQLSDYYEKFIAESKRLIDLSI | |
| | QNYHTFLIYITELLKKLQSTTVMNPYMKLAPGELTIIL | |
| 412 | MGTVSSRRSWWPLPLLLLLLLLLGPAGARAQEDEDGDYEELVLAL | PCSK9 |
| | RSEEDGLAEAPEHGTTATFHRCAKDPWRLPGTYVVVLKEETHLSQS | |
| | ERTARRLQAQAARRGYLTKILHVFHGLLPGFLVKMSGDLLELALKL | |
| | PHVDYIEEDSSVFAQSIPWNLERITPPRYRADEYQPPDGGSLVEVYL | |
| | LDTSIQSDHREIEGRVMVTDFENVPEEDGTRFHRQASKCDSHGTHL | |
| | AGVVSGRDAGVAKGASMRSLRVLNCQGKGTVSGTLIGLEFIRKSQL | |
| | VQPVGPLVVLLPLAGGYSRVLNAA | |
| | CQRLARAGVVLVTAAGNFRDDACLYSPASAPEVITVGATNAQDQP | |
| | VTLGTLGTNFGRCVDLFAPGEDIIGASSDCSTCFVSQSGTSQAAAHV | |
| | AGIAAMMLSAEPELTLAELRQRLIHFSAKDVINEAWFPEDQRVLTPN | |
| | LVAALPPSTHGAGWQLFCRTVWSAHSGPTRMATAVARCAPDEELL | |
| | SCSSFSRSGKRRGERMEAQGGKLVCRAHNAFGGEGVYAIARCCLLP | |
| | QANCSVHTAPPAEASMGTRVHCHQQGHVLTGCSSHWEVEDLGTH | |
| | KPPVLRPRGQPNQCVGHREASIHASCCHAPGLECKVKEHGIPAPQE | |
| | QVTVACEEGWTLTGCSALPGTSHVLGAYAVDNTCVVRSRDVSTTG | |
| | STSEGAVTAVAICCRSRHLAQASQELQ | |
| 413 | MDALKSAGRALIRSPSLAKQSWGGGGRHRKLPENWTDTRETLLEG | LDLRAP1 |
| | MLFSLKYLGMTLVEQPKGEELSAAAIKRIVATAKASGKKLQKVTLK | |
| | VSPRGIILTDNLTNQLIENVSIYRISYCTADKMHDKVFAYIAQSQHNQ | |
| | SLECHAFLCTKRKMAQAVTLTVAQAFKVAFEFWQVSKEEKEKRDK | |
| | ASQEGGDVLGARQDCTPSLKSLVATGNLLDLEETAKAPLSTVSANT | |
| | TNMDEVPRPQALSGSSVVWELDDGLDEAFSRLAQSRTNPQVLDTG | |
| | LTAQDMHYAQCLSPVDWDKPDSSGTEQDDLFSF | |
| 414 | MGDLSSLTPGGSMGLQVNRGSQSSLEGAPATAPEPHSLGILHASYSV | ABCG5 |
| | SHRVRPWWDITSCRQQWTRQILKDVSLYVESGQIMCILGSSGSGKT | |
| | TLLDAMSGRLGRAGTFLGEVYVNGRALRREQFQDCFSYVLQSDTL | |
| | LSSLTVRETLHYTALLAIRRGNPGSFQKKVEAVMAELSLSHVADRLI | |
| | GNYSLGGISTGERRRVSIAAQLLQDPKVMLFDEPTTGLDCMTANQI | |
| | VVLLVELARRNRIVVLTIHQPRSELFQLFDKIAILSFGELIFCGTPAEM | |
| | LDFFNDCGYPCPEHSNPFDFYMDLTSVDTQSKEREIETSKRVQMIES | |
| | AYKKSAICHKTLKNIERMKHLKTLPMVPFKTKDSPGVFSKLGVLLR | |
| | RVTRNLVRNKLAVITRLLQNLIMGLFLLFFVLRVRSNVLKGAIQDRV | |
| | GLLYQFVGATPYTGMLNAVNLFPVLRAVSDQESQDGLYQKWQMM | |
| | LAYALHVLPFSVVATMIFSSVCYWTLGLHPEVARFGYFSAALLAPH | |
| | LIGEFLTLVLLGIVQNPNIVNSVVALLSIAGVLVGSGFLRNIQEMPIPF | |
| | KIISYFTFQKYCSEILVVNEFYGLNFTCGSSNVSVTTNPMCAFTQGIQ | |
| | FIEKTCPGATSRFTMNFLILYSFIPALVILGIVVFKIRDHLISR | |
| 415 | MAGKAAEERGLPKGATPQDTSGLQDRLFSSESDNSLYFTYSGQPNT | ABCG8 |
| | LEVRDLNYQVDLASQVPWFEQLAQFKMPWTSPSCQNSCELGIQNLS | |
| | FKVRSGQMLAIIGSSGCGRASLLDVITGRGHGGKIKSGQIWINGQPSS | |
| | PQLVRKCVAHVRQHNQLLPNLTVRETLAFIAQMRLPRTFSQAQRDK | |
| | RVEDVIAELRLRQCADTRVGNMYVRGLSGGERRRVSIGVQLLWNP | |
| | GILILDEPTSGLDSFTAHNLVKTLSRLAKGNRLVLISLHQPRSDIFRLF | |
| | DLVLLMTSGTPIYLGAAQHMVQYFTAIGYPCPRYSNPADFYVDLTSI | |
| | DRRSREQELATREKAQSLAALFLEKVRDLDDFLWKAETKDLDEDT | |
| | CVESSVTPLDTNCLPSPTKMPGAVQQFTTLIRRQISNDFRDLPTLLIH | |
| | GAEACLMSMTIGFLYFGHGSIQLSFMDTAALLFMIGALIPFNVILDVI | |
| | SKCYSERAMLYYELEDGLYTTGPYFFAKILGELPEHCAYIIIYGMPT | |
| | YWLANLRPGLQPFLLHFLLVWLVVFCCRIMALAAAALLPTFHMASF | |
| | FSNALYNSFYLAGGFMINLSSLWTVPAWISKVSFLRWCFEGLMKIQ | |
| | FSRRTYKMPLGNLTIAVSGDKILSVMELDSYPLYAIYLIVIGLSGGFM | |
| | VLYYVSLRFIKQKPSQDW | |
| 416 | MGPPGSPWQWVTLLLGLLLPPAAPFWLLNVLFPPHTTPKAELSNHT | LCAT |
| | RPVILVPGCLGNQLEAKLDKPDVVNWMCYRKTEDFFTIWLDLNMF | |
| | LPLGVDCWIDNTRVVYNRSSGLVSNAPGVQIRVPGFGKTYSVEYLD | |
| | SSKLAGYLHTLVQNLVNNGYVRDETVRAAPYDWRLEPGQQEEYY | |
| | RKLAGLVEEMHAAYGKPVFLIGHSLGCLHLLYFLLRQPQAWKDRFI | |
| | DGFISLGAPWGGSIKPMLVLASGDNQGIPIMSSIKLKEEQRITTTSPW | |
| | MFPSRMAWPEDHVFISTPSFNYTGR | |
| | DFQRFFADLHFEEGWYMWLQSRDLLAGLPAPGVEVYCLYGVGLPT | |
| | PRTYIYDHGFPYTDPVGVLYEDGDDTVATRSTELCGLWQGRQPQPV | |
| | HLLPLHGIQHLNMVFSNLTLEHINAILLGAYRQGPPASPTASPEPPPP | |
| | E | |
| 417 | MKIATVSVLLPLALCLIQDAASKNEDQEMCHEFQAFMKNGKLFCPQ | SPINK5 |
| | DKKFFQSLDGIMFINKCATCKMILEKEAKSQKRARHLARAPKATAP | |
| | TELNCDDFKKGERDGDFICPDYYEAVCGTDGKTYDNRCALCAENA | |
| | KTGSQIGVKSEGECKSSNPEQDVCSAFRPFVRDGRLGCTRENDPVL | |
| | GPDGKTHGNKCAMCAELFLKEAENAKREGETRIRRNAEKDFCKEY | |
| | EKQVRNGRLFCTRESDPVRGPDGRMHGNKCALCAEIFKQRFSEENS | |
| | KTDQNLGKAEEKTKVKREIVKLCSQYQNQAKNGILFCTRENDPIRG | |
| | PDGKMHGNLCSMCQAYFQAENEEKKKAEARARNKRESGKA | |
| | TSYAELCSEYRKLVRNGKLACTRENDPIQGPDGKVHGNTCSMCEVF | |
| | FQAEEEEKKKKEGKSRNKRQSKSTASFEELCSEYRKSRKNGRLFCT | |
| | RENDPIQGPDGKMHGNTCSMCEAFFQQEERARAKAKREAAKEICSE | |
| | FRDQVRNGTLICTREHNPVRGPDGKMHGNKCAMCASVFKLEEEEK | |
| | KNDKEEKGKVEAEKVKREAVQELCSEYRHYVRNGRLPCTRENDPI | |
| | EGLDGKIHGNTCSMCEAFFQQEAKEKERAEPRAKVKREAEKETCDE | |
| | FRRLLQNGKLFCTRENDPVRGPDGKTHGNKCAMCKAVFQKENEER | |
| | KRKEEEDQRNAAGHGSSGGGGGNTQDECAEYREQMKNGRLS | |
| | CTRESDPVRDADGKSYNNQCTMCKAKLEREAERKNEYSRSRSNGT | |
| | GSESGKDTCDEFRSQMKNGKLICTRESDPVRGPDGKTHGNKCTMC | |
| | KEKLEREAAEKKKKEDEDRSNTGERSNTGERSNDKEDLCREFRSM | |
| | QRNGKLICTRENNPVRGPYGKMHINKCAMCQSIFDREANERKKKD | |
| | EEKSSSKPSNNAKDECSEFRNYIRNNELICPRENDPVHGADGKFYTN | |
| | KCYMCRAVFLTEALERAKLQEKPSHVRASQEEDSPDSFSSLDSEMC | |
| | KDYRVLPRIGYLCPKDLKPVCGDDGQTYNNPCMLCHENLIRQTNTH | |
| | IRSTGKCEESSTPGTTAASMPPSDE | |
| 418 | MEKNGNNRKLRVCVATCNRADYSKLAPIMFGIKTEPEFFELDVVVL | GNE |
| | GSHLIDDYGNTYRMIEQDDFDINTRLHTIVRGEDEAAMVESVGLAL | |
| | VKLPDVLNRLKPDIMIVHGDRFDALALATSAALMNIRILHIEGGEVS | |
| | GTIDDSIRHAITKLAHYHVCCTRSAEQHLISMCEDHDRILLAGCPSY | |
| | DKLLSAKNKDYMSIIRMWLGDDVKSKDYIVALQHPVTTDIKHSIKM | |
| | FELTLDALISFNKRTLVLFPNIDAGSKEMVRVMRKKGIEHHPNFRAV | |
| | KHVPFDQFIQLVAHAGCMIGNSSCGVREVGAFGTPVINLGTRQIGRE | |
| | TGENVLHVRDADTQDKILQALHLQFGKQYPCSKIYGDGNAVPRILK | |
| | FLKSIDLQEPLQKKFCFPPVKENISQDIDHILETLSALAVDLGGTNLR | |
| | VAIVSMKGEIVKKYTQFNPKTYEERINLILQMCVEAAAEAVKLNCRI | |
| | LGVGISTGGRVNPREGIVLHSTKLIQEWNSVDLRTPLSDTLHLPVWV | |
| | DNDGNCAALAERKFGQGKGLENFVTL | |
| | ITGTGIGGGIIHQHELIHGSSFCAAELGHLVVSLDGPDCSCGSHGCIE | |
| | AYASGMALQREAKKLHDEDLLLVEGMSVPKDEAVGALHLIQAAKL | |
| | GNAKAQSILRTAGTALGLGVVNILHTMNPSLVILSGVLASHYIHIVK | |
| | DVIRQQALSSVQDVDVVVSDLVDPALLGAASMVLDYTTRRIY | |
| 419 | DIQMTQTTSSLSASLGDRVTISCRASQDISKYLNWYQQKPDGTVKLL | Anti-CD19 scFv |
| | IYHTSRLHSGVPSRFSGSGSGTDYSLTISNLEQEDIATYFCQQGNTLP | (FMC63) |
| | YTFGGGTKLEITGSTSGSGKPGSGEGSTKGEVKLQESGPGLVAPSQS | |
| | LSVTCTVSGVSLPDYGVSWIRQPPRKGLEWLGVIWGSETTYYNSAL | |
| | KSRLTIIKDNSKSQVFLKMNSLQTDDTAIYYCAKHYYYGGSYAMD | |
| | YWGQGTSVTVSS | |
| 420 | DIQMTQTTSSLSASLGDRVTISCRASQDISKYLNWYQQKPDGTVKLL | Anti-CD19 scFv |
| | IYHTSRLHSGVPSRFSGSGSGTDYSLTISNLEQEDIATYFCQQGNTLP | (FMC63) |
| | YTFGGGTKLEITGGGGSGGGGSGGGGSEVKLQESGPGLVAPSQSLS | |
| | VTCTVSGVSLPDYGVSWIRQPPRKGLEWLGVIVVGSETTYYNSALKS | |
| | RLTIIKDNSKSQVFLKMNSLQTDDTAIYYCAKHYYYGGSYAMDYW | |
| | GQGTSVTVSS | |
| 421 | ESKYGPPCPPCP | IgG4 Hinge |
| 422 | TTTPAPRPPTPAPTIASQPLSLRPE | CD8 Hinge |
| 423 | IEVMYPPPYLDNEKSNGTIIHVKGKHLCPSPLFPGPSKP | CD28 |
| 424 | ACRPAAGGAVHTRGLDFACDIYIWAPLAGTCGVLLLSLVITLYC | CD8 |
| 425 | FWVLVVVGGVLACYSLLVTVAFIIFWV | CD28 |
| 426 | FWVLVVVGGVLACYSLLVTVAFIIFWV | CD28 |
| 427 | RSKRSRLLHSDYMNMTPRRPGPTRKHYQPYAPPRDFAAYRS | CD28 |
| 428 | KRGRKKLLYIFKQPFMRPVQTTQEEDGCSCRFPEEEEGGCEL | 4-1BB |
| 429 | RVKFSRSADAPAYQQGQNQLYNELNLGRREEYDVLDKRRGRDPEM | CD3zeta |
| | GGKPRRKNPQEGLYNELQKDKMAEAYSEIGMKGERRRGKGHDGL | |
| | YQGLSTATKDTYDALHMQALPPR | |
| 430 | RVKFSRSADAPAYKQGQNQLYNELNLGRREEYDVLDKRRGRDPEM | CD3zeta |
| | GGKPRRKNPQEGLYNELQKDKMAEAYSEIGMKGERRRGKGHDGL | |
| | YQGLSTATKDTYDALHMQALPPR | |

The application's sequence listing, which the Patent Office published only in electronic form, follows.

SEQUENCE LISTING (430 sequences)

SEQ ID NO: 1 - protein, 546 aa, Nipah Virus
  Nipah virus NiV-F with signal sequence
  ref <308>: DATABASE ACCESSION NUMBER: Q9IH63
  ref <309>: DATABASE ENTRY DATE: 2000-10-01
MVVILDKRCYCNLLILILMISECSVGILHYEKLSKIGLVKGVTRKYKIKSNPLTKDIVIKMIPNVSNMSQCTGSVMENYKTRLNGILTPIKGALEIYKNNTHDLVGDVRLAGVIMAGVAIGIATAAQITAGVALYEAMKNADNINKLKSSIESTNEAVVKLQETAEKTVYVLTALQDYINTNLVPTIDKISCKQTELSLDLALSKYLSDLLFVFGPNLQDPVSNSMTIQAISQAFGGNYETLLRTLGYATEDFDDLLESDSITGQIIYVDLSSYYIIVRVYFPILTEIQQAYIQELLPVSFNNDNSEWISIVPNFILVRNTLISNIEIGFCLITKRSVICNQDYATPMTNNMRECLTGSTEKCPRELVVSSHVPRFALSNGVLFANCISVTCQCQTTGRAISQSGEQTLLMIDNTTCPTAVLGNVIISLGKYLGSVNYNSEGIAIGPPVFTDKVDISSQISSMNQSLQQSKDYIKEAQRLLDTVNPSLISMLSMIILYVLSIASLCIGLITFISFIIVEKKRNTYSRLEDRRVRPTSSGDLYYIGT

SEQ ID NO: 2 - protein, 520 aa, Nipah Virus
  Nipah virus NiV-F F0
ILHYEKLSKIGLVKGVTRKYKIKSNPLTKDIVIKMIPNVSNMSQCTGSVMENYKTRLNGILTPIKGALEIYKNNTHDLVGDVRLAGVIMAGVAIGIATAAQITAGVALYEAMKNADNINKLKSSIESTNEAVVKLQETAEKTVYVLTALQDYINTNLVPTIDKISCKQTELSLDLALSKYLSDLLFVFGPNLQDPVSNSMTIQAISQAFGGNYETLLRTLGYATEDFDDLLESDSITGQIIYVDLSSYYIIVRVYFPILTEIQQAYIQELLPVSFNNDNSEWISIVPNFILVRNTLISNIEIGFCLITKRSVICNQDYATPMTNNMRECLTGSTEKCPRELVVSSHVPRFALSNGVLFANCISVTCQCQTTGRAISQSGEQTLLMIDNTTCPTAVLGNVIISLGKYLGSVNYNSEGIAIGPPVFTDKVDISSQISSMNQSLQQSKDYIKEAQRLLDTVNPSLISMLSMIILYVLSIASLCIGLITFISFIIVEKKRNTYSRLEDRRVRPTSSGDLYYIGT

SEQ ID NO: 3 - protein, 83 aa, Nipah Virus
  Nipah virus NiV-F F2
ILHYEKLSKIGLVKGVTRKYKIKSNPLTKDIVIKMIPNVSNMSQCTGSVMENYKTRLNGILTPIKGALEIYKNNTHDLVGDVR

SEQ ID NO: 4 - protein, 437 aa, Nipah virus
  Nipah virus NiV F F1
LAGVIMAGVAIGIATAAQITAGVALYEAMKNADNINKLKSSIESTNEAVVKLQETAEKTVYVLTALQDYINTNLVPTIDKISCKQTELSLDLALSKYLSDLLFVFGPNLQDPVSNSMTIQAISQAFGGNYETLLRTLGYATEDFDDLLESDSITGQIIYVDLSSYYIIVRVYFPILTEIQQAYIQELLPVSFNNDNSEWISIVPNFILVRNTLISNIEIGFCLITKRSVICNQDYATPMTNNMRECLTGSTEKCPRELVVSSHVPRFALSNGVLFANCISVTCQCQTTGRAISQSGEQTLLMIDNTTCPTAVLGNVIISLGKYLGSVNYNSEGIAIGPPVFTDKVDISSQISSMNQSLQQSKDYIKEAQRLLDTVNPSLISMLSMIILYVLSIASLCIGLITFISFIIVEKKRNTYSRLEDRRVRPTSSGDLYYIGT

SEQ ID NO: 5 - protein, 500 aa, Artificial Sequence
  Nipah virus NiV-F F0 T234 truncation
ILHYEKLSKIGLVKGVTRKYKIKSNPLTKDIVIKMIPNVSNMSQCTGSVMENYKTRLNGILTPIKGALEIYKNNTHDLVGDVRLAGVIMAGVAIGIATAAQITAGVALYEAMKNADNINKLKSSIESTNEAVVKLQETAEKTVYVLTALQDYINTNLVPTIDKISCKQTELSLDLALSKYLSDLLFVFGPNLQDPVSNSMTIQAISQAFGGNYETLLRTLGYATEDFDDLLESDSITGQIIYVDLSSYYIIVRVYFPILTEIQQAYIQELLPVSFNNDNSEWISIVPNFILVRNTLISNIEIGFCLITKRSVICNQDYATPMTNNMRECLTGSTEKCPRELVVSSHVPRFALSNGVLFANCISVTCQCQTTGRAISQSGEQTLLMIDNTTCPTAVLGNVIISLGKYLGSVNYNSEGIAIGPPVFTDKVDISSQISSMNQSLQQSKDYIKEAQRLLDTVNPSLISMLSMIILYVLSIASLCIGLITFISFIIVEKKRNTGT

SEQ ID NO: 6 - protein, 417 aa, Artificial Sequence
  Nipah virus NiV F F1 (aa 110-546) truncation
LAGVIMAGVAIGIATAAQITAGVALYEAMKNADNINKLKSSIESTNEAVVKLQETAEKTVYVLTALQDYINTNLVPTIDKISCKQTELSLDLALSKYLSDLLFVFGPNLQDPVSNSMTIQAISQAFGGNYETLLRTLGYATEDFDDLLESDSITGQIIYVDLSSYYIIVRVYFPILTEIQQAYIQELLPVSFNNDNSEWISIVPNFILVRNTLISNIEIGFCLITKRSVICNQDYATPMTNNMRECLTGSTEKCPRELVVSSHVPRFALSNGVLFANCISVTCQCQTTGRAISQSGEQTLLMIDNTTCPTAVLGNVIISLGKYLGSVNYNSEGIAIGPPVFTDKVDISSQISSMNQSLQQSKDYIKEAQRLLDTVNPSLISMLSMIILYVLSIASLCIGLITFISFIIVEKKRNTGT

SEQ ID NO: 7 - protein, 500 aa, Artificial Sequence
  Nipah virus NiV-F F0 T234 truncation (aa 525-544) AND mutation on N-linked glycosylation site
ILHYEKLSKIGLVKGVTRKYKIKSNPLTKDIVIKMIPNVSNMSQCTGSVMENYKTRLNGILTPIKGALEIYKNQTHDLVGDVRLAGVIMAGVAIGIATAAQITAGVALYEAMKNADNINKLKSSIESTNEAVVKLQETAEKTVYVLTALQDYINTNLVPTIDKISCKQTELSLDLALSKYLSDLLFVFGPNLQDPVSNSMTIQAISQAFGGNYETLLRTLGYATEDFDDLLESDSITGQIIYVDLSSYYIIVRVYFPILTEIQQAYIQELLPVSFNNDNSEWISIVPNFILVRNTLISNIEIGFCLITKRSVICNQDYATPMTNNMRECLTGSTEKCPRELVVSSHVPRFALSNGVLFANCISVTCQCQTTGRAISQSGEQTLLMIDNTTCPTAVLGNVIISLGKYLGSVNYNSEGIAIGPPVFTDKVDISSQISSMNQSLQQSKDYIKEAQRLLDTVNPSLISMLSMIILYVLSIASLCIGLITFISFIIVEKKRNTGT

SEQ ID NO: 8 - protein, 524 aa, Artificial Sequence
  Truncated NiV fusion glycoprotein (FcDelta22) at cytoplasmic tail (with signal sequence)
MVVILDKRCYCNLLILILMISECSVGILHYEKLSKIGLVKGVTRKYKIKSNPLTKDIVIKMIPNVSNMSQCTGSVMENYKTRLNGILTPIKGALEIYKNNTHDLVGDVRLAGVIMAGVAIGIATAAQITAGVALYEAMKNADNINKLKSSIESTNEAVVKLQETAEKTVYVLTALQDYINTNLVPTIDKISCKQTELSLDLALSKYLSDLLFVFGPNLQDPVSNSMTIQAISQAFGGNYETLLRTLGYATEDFDDLLESDSITGQIIYVDLSSYYIIVRVYFPILTEIQQAYIQELLPVSFNNDNSEWISIVPNFILVRNTLISNIEIGFCLITKRSVICNQDYATPMTNNMRECLTGSTEKCPRELVVSSHVPRFALSNGVLFANCISVTCQCQTTGRAISQSGEQTLLMIDNTTCPTAVLGNVIISLGKYLGSVNYNSEGIAIGPPVFTDKVDISSQISSMNQSLQQSKDYIKEAQRLLDTVNPSLISMLSMIILYVLSIASLCIGLITFISFIIVEKKRNT

SEQ ID NO: 9 - protein, 602 aa, Nipah Virus
  NiVG protein attachment glycoprotein
MGPAENKKVRFENTTSDKGKIPSKVIKSYYGTMDIKKINEGLLDSKILSAFNTVIALLGSIVIIVMNIMIIQNYTRSTDNQAVIKDALQGIQQQIKGLADKIGTEIGPKVSLIDTSSTITIPANIGLLGSKISQSTASINENVNEKCKFTLPPLKIHECNISCPNPLPFREYRPQTEGVSNLVGLPNNICLQKTSNQILKPKLISYTLPVVGQSGTCITDPLLAMDEGYFAYSHLERIGSCSRGVSKQRIIGVGEVLDRGDEVPSLFMTNVWTPPNPNTVYHCSAVYNNEFYYVLCAVSTVGDPILNSTYWSGSLMMTRLAVKPKSNGGGYNQHQLALRSIEKGRYDKVMPYGPSGIKQGDTLYFPAVGFLVRTEFKYNDSNCPITKCQYSKPENCRLSMGIRPNSHYILRSGLLKYNLSDGENPKVVFIEISDQRLSIGSPSKIYDSLGQPVFYQASFSWDTMIKFGDVLTVNPLVVNWRNNTVISRPGQSQCPRFNTCPEICWEGVYNDAFLIDRINWISAGVFLDSNQTAENPVFTVFKDNEILYRAQLASEDTNAQKTITNCFLLKNKIWCISLVEIYDTGDNVIRPKLFAVKIPEQC

SEQ ID NO: 10 - protein, 597 aa, Artificial Sequence
  NiVG protein attachment glycoprotein Truncated delta5
MGKVRFENTTSDKGKIPSKVIKSYYGTMDIKKINEGLLDSKILSAFNTVIALLGSIVIIVMNIMIIQNYTRSTDNQAVIKDALQGIQQQIKGLADKIGTEIGPKVSLIDTSSTITIPANIGLLGSKISQSTASINENVNEKCKFTLPPLKIHECNISCPNPLPFREYRPQTEGVSNLVGLPNNICLQKTSNQILKPKLISYTLPVVGQSGTCITDPLLAMDEGYFAYSHLERIGSCSRGVSKQRIIGVGEVLDRGDEVPSLFMTNVWTPPNPNTVYHCSAVYNNEFYYVLCAVSTVGDPILNSTYWSGSLMMTRLAVKPKSNGGGYNQHQLALRSIEKGRYDKVMPYGPSGIKQGDTLYFPAVGFLVRTEFKYNDSNCPITKCQYSKPENCRLSMGIRPNSHYILRSGLLKYNLSDGENPKVVFIEISDQRLSIGSPSKIYDSLGQPVFYQASFSWDTMIKFGDVLTVNPLVVNWRNNTVISRPGQSQCPRFNTCPEICWEGVYNDAFLIDRINWISAGVFLDSNQTAENPVFTVFKDNEILYRAQLASEDTNAQKTITNCFLLKNKIWCISLVEIYDTGDNVIRPKLFAVKIPEQC

SEQ ID NO: 11 - protein, 592 aa, Artificial Sequence
  NiVG protein attachment glycoprotein Truncated delta10
MGNTTSDKGKIPSKVIKSYYGTMDIKKINEGLLDSKILSAFNTVIALLGSIVIIVMNIMIIQNYTRSTDNQAVIKDALQGIQQQIKGLADKIGTEIGPKVSLIDTSSTITIPANIGLLGSKISQSTASINENVNEKCKFTLPPLKIHECNISCPNPLPFREYRPQTEGVSNLVGLPNNICLQKTSNQILKPKLISYTLPVVGQSGTCITDPLLAMDEGYFAYSHLERIGSCSRGVSKQRIIGVGEVLDRGDEVPSLFMTNVWTPPNPNTVYHCSAVYNNEFYYVLCAVSTVGDPILNSTYWSGSLMMTRLAVKPKSNGGGYNQHQLALRSIEKGRYDKVMPYGPSGIKQGDTLYFPAVGFLVRTEFKYNDSNCPITKCQYSKPENCRLSMGIRPNSHYILRSGLLKYNLSDGENPKVVFIEISDQRLSIGSPSKIYDSLGQPVFYQASFSWDTMIKFGDVLTVNPLVVNWRNNTVISRPGQSQCPRFNTCPEICWEGVYNDAFLIDRINWISAGVFLDSNQTAENPVFTVFKDNEILYRAQLASEDTNAQKTITNCFLLKNKIWCISLVEIYDTGDNVIRPKLFAVKIPEQC

SEQ ID NO: 12 - protein, 587 aa, Artificial Sequence
  NiVG protein attachment glycoprotein Truncated delta15
MGKGKIPSKVIKSYYGTMDIKKINEGLLDSKILSAFNTVIALLGSIVIIVMNIMIIQNYTRSTDNQAVIKDALQGIQQQIKGLADKIGTEIGPKVSLIDTSSTITIPANIGLLGSKISQSTASINENVNEKCKFTLPPLKIHECNISCPNPLPFREYRPQTEGVSNLVGLPNNICLQKTSNQILKPKLISYTLPVVGQSGTCITDPLLAMDEGYFAYSHLERIGSCSRGVSKQRIIGVGEVLDRGDEVPSLFMTNVWTPPNPNTVYHCSAVYNNEFYYVLCAVSTVGDPILNSTYWSGSLMMTRLAVKPKSNGGGYNQHQLALRSIEKGRYDKVMPYGPSGIKQGDTLYFPAVGFLVRTEFKYNDSNCPITKCQYSKPENCRLSMGIRPNSHYILRSGLLKYNLSDGENPKVVFIEISDQRLSIGSPSKIYDSLGQPVFYQASFSWDTMIKFGDVLTVNPLVVNWRNNTVISRPGQSQCPRFNTCPEICWEGVYNDAFLIDRINWISAGVFLDSNQTAENPVFTVFKDNEILYRAQLASEDTNAQKTITNCFLLKNKIWCISLVEIYDTGDNVIRPKLFAVKIPEQC

SEQ ID NO: 13 - protein, 582 aa, Artificial Sequence
  NiVG protein attachment glycoprotein Truncated delta20
MGSKVIKSYYGTMDIKKINEGLLDSKILSAFNTVIALLGSIVIIVMNIMIIQNYTRSTDNQAVIKDALQGIQQQIKGLADKIGTEIGPKVSLIDTSSTITIPANIGLLGSKISQSTASINENVNEKCKFTLPPLKIHECNISCPNPLPFREYRPQTEGVSNLVGLPNNICLQKTSNQILKPKLISYTLPVVGQSGTCITDPLLAMDEGYFAYSHLERIGSCSRGVSKQRIIGVGEVLDRGDEVPSLFMTNVWTPPNPNTVYHCSAVYNNEFYYVLCAVSTVGDPILNSTYWSGSLMMTRLAVKPKSNGGGYNQHQLALRSIEKGRYDKVMPYGPSGIKQGDTLYFPAVGFLVRTEFKYNDSNCPITKCQYSKPENCRLSMGIRPNSHYILRSGLLKYNLSDGENPKVVFIEISDQRLSIGSPSKIYDSLGQPVFYQASFSWDTMIKFGDVLTVNPLVVNWRNNTVISRPGQSQCPRFNTCPEICWEGVYNDAFLIDRINWISAGVFLDSNQTAENPVFTVFKDNEILYRAQLASEDTNAQKTITNCFLLKNKIWCISLVEIYDTGDNVIRPKLFAVKIPEQC

SEQ ID NO: 14 - protein, 577 aa, Artificial Sequence
  NiVG protein attachment glycoprotein Truncated delta25
MGSYYGTMDIKKINEGLLDSKILSAFNTVIALLGSIVIIVMNIMIIQNYTRSTDNQAVIKDALQGIQQQIKGLADKIGTEIGPKVSLIDTSSTITIPANIGLLGSKISQSTASINENVNEKCKFTLPPLKIHECNISCPNPLPFREYRPQTEGVSNLVGLPNNICLQKTSNQILKPKLISYTLPVVGQSGTCITDPLLAMDEGYFAYSHLERIGSCSRGVSKQRIIGVGEVLDRGDEVPSLFMTNVWTPPNPNTVYHCSAVYNNEFYYVLCAVSTVGDPILNSTYWSGSLMMTRLAVKPKSNGGGYNQHQLALRSIEKGRYDKVMPYGPSGIKQGDTLYFPAVGFLVRTEFKYNDSNCPITKCQYSKPENCRLSMGIRPNSHYILRSGLLKYNLSDGENPKVVFIEISDQRLSIGSPSKIYDSLGQPVFYQASFSWDTMIKFGDVLTVNPLVVNWRNNTVISRPGQSQCPRFNTCPEICWEGVYNDAFLIDRINWISAGVFLDSNQTAENPVFTVFKDNEILYRAQLASEDTNAQKTITNCFLLKNKIWCISLVEIYDTGDNVIRPKLFAVKIPEQC

SEQ ID NO: 15 - protein, 573 aa, Artificial Sequence
  NiVG protein attachment glycoprotein Truncated delta30
MGTMDIKKINEGLLDSKILSAFNTVIALLGSIVIIVMNIMIIQNYTRSTDNQAVIKDALQGIQQQIKGLADKIGTEIGPKVSLIDTSSTITIPANIGLLGSKISQSTASINENVNEKCKFTLPPLKIHECNISCPNPLPFREYRPQTEGVSNLVGLPNNICLQKTSNQILKPKLISYTLPVVGQSGTCITDPLLAMDEGYFAYSHLERIGSCSRGVSKQRIIGVGEVLDRGDEVPSLFMTNVWTPPNPNTVYHCSAVYNNEFYYVLCAVSTVGDPILNSTYWSGSLMMTRLAVKPKSNGGGYNQHQLALRSIEKGRYDKVMPYGPSGIKQGDTLYFPAVGFLVRTEFKYNDSNCPITKCQYSKPENCRLSMGIRPNSHYILRSGLLKYNLSDGENPKVVFIEISDQRLSIGSPSKIYDSLGQPVFYQASFSWDTMIKFGDVLTVNPLVVNWRNNTVISRPGQSQCPRFNTCPEICWEGVYNDAFLIDRINWISAGVFLDSNQTAENPVFTVFKDNEILYRAQLASEDTNAQKTITNCFLLKNKIWCISLVEIYDTGDNVIRPKLFAVKIPEQC

SEQ ID NO: 16 - protein, 569 aa, Artificial Sequence
  NiVG protein attachment glycoprotein- Truncated and mutated
MKKINEGLLDSKILSAFNTVIALLGSIVIIVMNIMIIQNYTRSTDNQAVIKDALQGIQQQIKGLADKIGTEIGPKVSLIDTSSTITIPANIGLLGSKISQSTASINENVNEKCKFTLPPLKIHECNISCPNPLPFREYRPQTEGVSNLVGLPNNICLQKTSNQILKPKLISYTLPVVGQSGTCITDPLLAMDEGYFAYSHLERIGSCSRGVSKQRIIGVGEVLDRGDEVPSLFMTNVWTPPNPNTVYHCSAVYNNEFYYVLCAVSTVGDPILNSTYWSGSLMMTRLAVKPKSNGGGYNQHQLALRSIEKGRYDKVMPYGPSGIKQGDTLYFPAVGFLVRTEFKYNDSNCPITKCQYSKPENCRLSMGIRPNSHYILRSGLLKYNLSDGENPKVVFIEISDQRLSIGSPSKIYDSLGQPVFYQASFSWDTMIKFGDVLTVNPLVVNWRNNTVISRPGQSQCPRFNTCPAICAEGVYNDAFLIDRINWISAGVFLDSNATAANPVFTVFKDNEILYRAQLASEDTNAQKTITNCFLLKNKIWCISLVEIYDTGDNVIRPKLFAVKIPEQCT

SEQ ID NO: 17 - protein, 546 aa, Hendra virus
  Hendra virus F protein (with signal sequence)
MATQEVRLKCLLCGIIVLVLSLEGLGILHYEKLSKIGLVKGITRKYKIKSNPLTKDIVIKMIPNVSNVSKCTGTVMENYKSRLTGILSPIKGAIELYNNNTHDLVGDVKLAGVVMAGIAIGIATAAQITAGVALYEAMKNADNINKLKSSIESTNEAVVKLQETAEKTVYVLTALQDYINTNLVPTIDQISCKQTELALDLALSKYLSDLLFVFGPNLQDPVSNSMTIQAISQAFGGNYETLLRTLGYATEDFDDLLESDSIAGQIVYVDLSSYYIIVRVYFPILTEIQQAYVQELLPVSFNNDNSEWISIVPNFVLIRNTLISNIEVKYCLITKKSVICNQDYATPMTASVRECLTGSTDKCPRELVVSSHVPRFALSGGVLFANCISVTCQCQTTGRAISQSGEQTLLMIDNTTCTTVVLGNIIISLGKYLGSINYNSESIAVGPPVYTDKVDISSQISSMNQSLQQSKDYIKEAQKILDTVNPSLISMLSMIILYVLSIAALCIGLITFISFVIVEKKRGNYSRLDDRQVRPVSNGDLYYIGT

SEQ ID NO: 18 - protein, 604 aa, Hendra virus
  Hendra virus G protein
MMADSKLVSLNNNLSGKIKDQGKVIKNYYGTMDIKKINDGLLDSKILGAFNTVIALLGSIIIIVMNIMIIQNYTRTTDNQALIKESLQSVQQQIKALTDKIGTEIGPKVSLIDTSSTITIPANIGLLGSKISQSTSSINENVNDKCKFTLPPLKIHECNISCPNPLPFREYRPISQGVSDLVGLPNQICLQKTTSTILKPRLISYTLPINTREGVCITDPLLAVDNGFFAYSHLEKIGSCTRGIAKQRIIGVGEVLDRGDKVPSMFMTNVWTPPNPSTIHHCSSTYHEDFYYTLCAVSHVGDPILNSTSWTESLSLIRLAVRPKSDSGDYNQKYIAITKVERGKYDKVMPYGPSGIKQGDTLYFPAVGFLPRTEFQYNDSNCPIIHCKYSKAENCRLSMGVNSKSHYILRSGLLKYNLSLGGDIILQFIEIADNRLTIGSPSKIYNSLGQPVFYQASYSWDTMIKLGDVDTVDPLRVQWRNNSVISRPGQSQCPRFNVCPEVCWEGTYNDAFLIDRLNWVSAGVYLNSNQTAENPVFAVFKDNEILYQVPLAEDDTNAQKTITDCFLLENVIWCISLVEIYDTGDSVIRPKLFAVKIPAQCSES

SEQ ID NO: 19 - protein, 526 aa, Artificial Sequence
  Nipah virus NiV-F F0 T234 truncation (with signal sequence)
MVVILDKRCYCNLLILILMISECSVGILHYEKLSKIGLVKGVTRKYKIKSNPLTKDIVIKMIPNVSNMSQCTGSVMENYKTRLNGILTPIKGALEIYKNNTHDLVGDVRLAGVIMAGVAIGIATAAQITAGVALYEAMKNADNINKLKSSIESTNEAVVKLQETAEKTVYVLTALQDYINTNLVPTIDKISCKQTELSLDLALSKYLSDLLFVFGPNLQDPVSNSMTIQAISQAFGGNYETLLRTLGYATEDFDDLLESDSITGQIIYVDLSSYYIIVRVYFPILTEIQQAYIQELLPVSFNNDNSEWISIVPNFILVRNTLISNIEIGFCLITKRSVICNQDYATPMTNNMRECLTGSTEKCPRELVVSSHVPRFALSNGVLFANCISVTCQCQTTGRAISQSGEQTLLMIDNTTCPTAVLGNVIISLGKYLGSVNYNSEGIAIGPPVFTDKVDISSQISSMNQSLQQSKDYIKEAQRLLDTVNPSLISMLSMIILYVLSIASLCIGLITFISFIIVEKKRNTGT

SEQ ID NO: 20 - protein, 526 aa, Artificial Sequence
  Nipah virus NiV-F F0 T234 truncation and mutation on N-linked glycosylation site (with signal sequence)
MVVILDKRCYCNLLILILMISECSVGILHYEKLSKIGLVKGVTRKYKIKSNPLTKDIVIKMIPNVSNMSQCTGSVMENYKTRLNGILTPIKGALEIYKNQTHDLVGDVRLAGVIMAGVAIGIATAAQITAGVALYEAMKNADNINKLKSSIESTNEAVVKLQETAEKTVYVLTALQDYINTNLVPTIDKISCKQTELSLDLALSKYLSDLLFVFGPNLQDPVSNSMTIQAISQAFGGNYETLLRTLGYATEDFDDLLESDSITGQIIYVDLSSYYIIVRVYFPILTEIQQAYIQELLPVSFNNDNSEWISIVPNFILVRNTLISNIEIGFCLITKRSVICNQDYATPMTNNMRECLTGSTEKCPRELVVSSHVPRFALSNGVLFANCISVTCQCQTTGRAISQSGEQTLLMIDNTTCPTAVLGNVIISLGKYLGSVNYNSEGIAIGPPVFTDKVDISSQISSMNQSLQQSKDYIKEAQRLLDTVNPSLISMLSMIILYVLSIASLCIGLITFISFIIVEKKRNTGT

SEQ ID NO: 21 - protein, 524 aa, Artificial Sequence; identical to SEQ ID NO: 8
  Truncated NiV fusion glycoprotein (FcDelta22) at cytoplasmic tail (with signal sequence)

SEQ ID NO: 22 - protein, 569 aa, Artificial Sequence
  NiVG protein attachment glycoprotein Truncated (Gc delta34)
MKKINEGLLDSKILSAFNTVIALLGSIVIIVMNIMIIQNYTRSTDNQAVIKDALQGIQQQIKGLADKIGTEIGPKVSLIDTSSTITIPANIGLLGSKISQSTASINENVNEKCKFTLPPLKIHECNISCPNPLPFREYRPQTEGVSNLVGLPNNICLQKTSNQILKPKLISYTLPVVGQSGTCITDPLLAMDEGYFAYSHLERIGSCSRGVSKQRIIGVGEVLDRGDEVPSLFMTNVWTPPNPNTVYHCSAVYNNEFYYVLCAVSTVGDPILNSTYWSGSLMMTRLAVKPKSNGGGYNQHQLALRSIEKGRYDKVMPYGPSGIKQGDTLYFPAVGFLVRTEFKYNDSNCPITKCQYSKPENCRLSMGIRPNSHYILRSGLLKYNLSDGENPKVVFIEISDQRLSIGSPSKIYDSLGQPVFYQASFSWDTMIKFGDVLTVNPLVVNWRNNTVISRPGQSQCPRFNTCPEICWEGVYNDAFLIDRINWISAGVFLDSNQTAENPVFTVFKDNEILYRAQLASEDTNAQKTITNCFLLKNKIWCISLVEIYDTGDNVIRPKLFAVKIPEQCT

SEQ ID NO: 23 - protein, 498 aa, Artificial Sequence
  Truncated  mature NiV fusion glycoprotein (FcDelta22) at cytoplasmic tail
ILHYEKLSKIGLVKGVTRKYKIKSNPLTKDIVIKMIPNVSNMSQCTGSVMENYKTRLNGILTPIKGALEIYKNNTHDLVGDVRLAGVIMAGVAIGIATAAQITAGVALYEAMKNADNINKLKSSIESTNEAVVKLQETAEKTVYVLTALQDYINTNLVPTIDKISCKQTELSLDLALSKYLSDLLFVFGPNLQDPVSNSMTIQAISQAFGGNYETLLRTLGYATEDFDDLLESDSITGQIIYVDLSSYYIIVRVYFPILTEIQQAYIQELLPVSFNNDNSEWISIVPNFILVRNTLISNIEIGFCLITKRSVICNQDYATPMTNNMRECLTGSTEKCPRELVVSSHVPRFALSNGVLFANCISVTCQCQTTGRAISQSGEQTLLMIDNTTCPTAVLGNVIISLGKYLGSVNYNSEGIAIGPPVFTDKVDISSQISSMNQSLQQSKDYIKEAQRLLDTVNPSLISMLSMIILYVLSIASLCIGLITFISFIIVEKKRNT

SEQ ID NO: 24 - protein, 557 aa, Cedar virus
  fusion glycoprotein
MSNKRTTVLIIISYTLFYLNNAAIVGFDFDKLNKIGVVQGRVLNYKIKGDPMTKDLVLKFIPNIVNITECVREPLSRYNETVRRLLLPIHNMLGLYLNNTNAKMTGLMIAGVIMGGIAIGIATAAQITAGFALYEAKKNTENIQKLTDSIMKTQDSIDKLTDSVGTSILILNKLQTYINNQLVPNLELLSCRQNKIEFDLMLTKYLVDLMTVIGPNINNPVNKDMTIQSLSLLFDGNYDIMMSELGYTPQDFLDLIESKSITGQIIYVDMENLYVVIRTYLPTLIEVPDAQIYEFNKITMSSNGGEYLSTIPNFILIRGNYMSNIDVATCYMTKASVICNQDYSLPMSQNLRSCYQGETEYCPVEAVIASHSPRFALTNGVIFANCINTICRCQDNGKTITQNINQFVSMIDNSTCNDVMVDKFTIKVGKYMGRKDINNINIQIGPQIIIDKVDLSNEINKMNQSLKDSIFYLREAKRILDSVNISLISPSVQLFLIIISVLSFIILLIIIVYLYCKSKHSYKYNKFIDDPDYYNDYKRERINGKASKSNNIYYVGD

SEQ ID NO: 25 - protein, 545 aa, Mojiang virus
  fusion protein
MALNKNMFSSLFLGYLLVYATTVQSSIHYDSLSKVGVIKGLTYNYKIKGSPSTKLMVVKLIPNIDSVKNCTQKQYDEYKNLVRKALEPVKMAIDTMLNNVKSGNNKYRFAGAIMAGVALGVATAATVTAGIALHRSNENAQAIANMKSAIQNTNEAVKQLQLANKQTLAVIDTIRGEINNNIIPVINQLSCDTIGLSVGIRLTQYYSEIITAFGPALQNPVNTRITIQAISSVFNGNFDELLKIMGYTSGDLYEILHSELIRGNIIDVDVDAGYIALEIEFPNLTLVPNAVVQELMPISYNIDGDEWVTLVPRFVLTRTTLLSNIDTSRCTITDSSVICDNDYALPMSHELIGCLQGDTSKCAREKVVSSYVPKFALSDGLVYANCLNTICRCMDTDTPISQSLGATVSLLDNKRCSVYQVGDVLISVGSYLGDGEYNADNVELGPPIVIDKIDIGNQLAGINQTLQEAEDYIEKSEEFLKGVNPSIITLGSMVVLYIFMILIAIVSVIALVLSIKLTVKGNVVRQQFTYTQHVPSMENINYVSH

SEQ ID NO: 26 - protein, 662 aa, Bat Paramyxovirus
  fusion protein
MKKKTDNPTISKRGHNHSRGIKSRALLRETDNYSNGLIVENLVRNCHHPSKNNLNYTKTQKRDSTIPYRVEERKGHYPKIKHLIDKSYKHIKRGKRRNGHNGNIITIILLLILILKTQMSEGAIHYETLSKIGLIKGITREYKVKGTPSSKDIVIKLIPNVTGLNKCTNISMENYKEQLDKILIPINNIIELYANSTKSAPGNARFAGVIIAGVALGVAAAAQITAGIALHEARQNAERINLLKDSISATNNAVAELQEATGGIVNVITGMQDYINTNLVPQIDKLQCSQIKTALDISLSQYYSEILTVFGPNLQNPVTTSMSIQAISQSFGGNIDLLLNLLGYTANDLLDLLESKSITGQITYINLEHYFMVIRVYYPIMTTISNAYVQELIKISFNVDGSEWVSLVPSYILIRNSYLSNIDISECLITKNSVICRHDFAMPMSYTLKECLTGDTEKCPREAVVTSYVPRFAISGGVIYANCLSTTCQCYQTGKVIAQDGSQTLMMIDNQTCSIVRIEEILISTGKYLGSQEYNTMHVSVGNPVFTDKLDITSQISNINQSIEQSKFYLDKSKAILDKINLNLIGSVPISILFIIAILSLILSIITFVIVMIIVRRYNKYTPLINSDPSSRRSTIQDVYIIPNPGEHSIRSAARSIDRDRD

SEQ ID NO: 27 - protein, 6 aa, Artificial Sequence
  Peptide Linker
  REPEAT (1)...(6): Repeated 1 to 6 times
GGGGGS

SEQ ID NO: 28 - protein, 602 aa, nipah virus
  attachment glycoprotein
MPAENKKVRFENTTSDKGKIPSKVIKSYYGTMDIKKINEGLLDSKILSAFNTVIALLGSIVIIVMNIMIIQNYTRSTDNQAVIKDALQGIQQQIKGLADKIGTEIGPKVSLIDTSSTITIPANIGLLGSKISQSTASINENVNEKCKFTLPPLKIHECNISCPNPLPFREYRPQTEGVSNLVGLPNNICLQKTSNQILKPKLISYTLPVVGQSGTCITDPLLAMDEGYFAYSHLERIGSCSRGVSKQRIIGVGEVLDRGDEVPSLFMTNVWTPPNPNTVYHCSAVYNNEFYYVLCAVSTVGDPILNSTYWSGSLMMTRLAVKPKSNGGGYNQHQLALRSIEKGRYDKVMPYGPSGIKQGDTLYFPAVGFLVRTEFKYNDSNCPITKCQYSKPENCRLSMGIRPNSHYILRSGLLKYNLSDGENPKVVFIEISDQRLSIGSPSKIYDSLGQPVFYQASFSWDTMIKFGDVLTVNPLVVNWRNNTVISRPGQSQCPRFNTCPEICWEGVYNDAFLIDRINWISAGVFLDSNQTAENPVFTVFKDNEILYRAQLASEDTNAQKTITNCFLLKNKIWCISLVEIYDTGDNVIRPKLFAVKIPEQCT

SEQ ID NO: 29 - protein, 622 aa, Cedar virus
  attachment glycoprotein
MLSQLQKNYLDNSNQQGDKMNNPDKKLSVNFNPLELDKGQKDLNKSYYVKNKNYNVSNLLNESLHDIKFCIYCIFSLLIIITIINIITISIVITRLKVHEENNGMESPNLQSIQDSLSSLTNMINTEITPRIGILVTATSVTLSSSINYVGTKTNQLVNELKDYITKSCGFKVPELKLHECNISCADPKISKSAMYSTNAYAELAGPPKIFCKSVSKDPDFRLKQIDYVIPVQQDRSICMNNPLLDISDGFFTYIHYEGINSCKKSDSFKVLLSHGEIVDRGDYRPSLYLLSSHYHPYSMQVINCVPVTCNQSSFVFCHISNNTKTLDNSDYSSDEYYITYFNGIDRPKTKKIPINNMTADNRYIHFTFSGGGGVCLGEEFIIPVTTVINTDVFTHDYCESFNCSVQTGKSLKEICSESLRSPTNSSRYNLNGIMIISQNNMTDFKIQLNGITYNKLSFGSPGRLSKTLGQVLYYQSSMSWDTYLKAGFVEKWKPFTPNWMNNTVISRPNQGNCPRYHKCPEICYGGTYNDIAPLDLGKDMYVSVILDSDQLAENPEITVFNSTTILYKERVSKDELNTRSTTTSCFLFLDEPWCISVLETNRFNGKSIRPEIYSYKIPKYC

SEQ ID NO: 30 - protein, 632 aa, Bat Paramyxovirus
  glycoprotein
MPQKTVEFINMNSPLERGVSTLSDKKTLNQSKITKQGYFGLGSHSERNWKKQKNQNDHYMTVSTMILEILVVLGIMFNLIVLTMVYYQNDNINQRMAELTSNITVLNLNLNQLTNKIQREIIPRITLIDTATTITIPSAITYILATLTTRISELLPSINQKCEFKTPTLVLNDCRINCTPPLNPSDGVKMSSLATNLVAHGPSPCRNFSSVPTIYYYRIPGLYNRTALDERCILNPRLTISSTKFAYVHSEYDKNCTRGFKYYELMTFGEILEGPEKEPRMFSRSFYSPTNAVNYHSCTPIVTVNEGYFLCLECTSSDPLYKANLSNSTFHLVILRHNKDEKIVSMPSFNLSTDQEYVQIIPAEGGGTAESGNLYFPCIGRLLHKRVTHPLCKKSNCSRTDDESCLKSYYNQGSPQHQVVNCLIRIRNAQRDNPTWDVITVDLTNTYPGSRSRIFGSFSKPMLYQSSVSWHTLLQVAEITDLDKYQLDWLDTPYISRPGGSECPFGNYCPTVCWEGTYNDVYSLTPNNDLFVTVYLKSEQVAENPYFAIFSRDQILKEFPLDAWISSARTTTISCFMFNNEIWCIAALEITRLNDDIIRPIYYSFWLPTDCRTPYPHTGKMTRVPLRSTYNY

SEQ ID NO: 31 - protein, 625 aa, Mojiang virus
  attachment glycoprotein
MATNRDNTITSAEVSQEDKVKKYYGVETAEKVADSISGNKVFILMNTLLILTGAIITITLNITNLTAAKSQQNMLKIIQDDVNAKLEMFVNLDQLVKGEIKPKVSLINTAVSVSIPGQISNLQTKFLQKYVYLEESITKQCTCNPLSGIFPTSGPTYPPTDKPDDDTTDDDKVDTTIKPIEYPKPDGCNRTGDHFTMEPGANFYTVPNLGPASSNSDECYTNPSFSIGSSIYMFSQEIRKTDCTAGEILSIQIVLGRIVDKGQQGPQASPLLVWAVPNPKIINSCAVAAGDEMGWVLCSVTLTAASGEPIPHMFDGFWLYKLEPDTEVVSYRITGYAYLLDKQYDSVFIGKGGGIQKGNDLYFQMYGLSRNRQSFKALCEHGSCLGTGGGGYQVLCDRAVMSFGSEESLITNAYLKVNDLASGKPVIIGQTFPPSDSYKGSNGRMYTIGDKYGLYLAPSSWNRYLRFGITPDISVRSTTWLKSQDPIMKILSTCTNTDRDMCPEICNTRGYQDIFPLSEDSEYYTYIGITPNNGGTKNFVAVRDSDGHIASIDILQNYYSITSATISCFMYKDEIWCIAITEGKKQKDNPQRIYAHSYKIRQMCYNMKSATVTVGNAKNITIRRY

SEQ ID NO: 32 - protein, 552 aa, Artificial Sequence
  NivG protein attachment glycoprotein (Without cytoplasmic tail)
FNTVIALLGSIVIIVMNIMIIQNYTRSTDNQAVIKDALQGIQQQIKGLADKIGTEIGPKVSLIDTSSTITIPANIGLLGSKISQSTASINENVNEKCKFTLPPLKIHECNISCPNPLPFREYRPQTEGVSNLVGLPNNICLQKTSNQILKPKLISYTLPVVGQSGTCITDPLLAMDEGYFAYSHLERIGSCSRGVSKQRIIGVGEVLDRGDEVPSLFMTNVWTPPNPNTVYHCSAVYNNEFYYVLCAVSTVGDPILNSTYWSGSLMMTRLAVKPKSNGGGYNQHQLALRSIEKGRYDKVMPYGPSGIKQGDTLYFPAVGFLVRTEFKYNDSNCPITKCQYSKPENCRLSMGIRPNSHYILRSGLLKYNLSDGENPKVVFIEISDQRLSIGSPSKIYDSLGQPVFYQASFSWDTMIKFGDVLTVNPLVVNWRNNTVISRPGQSQCPRFNTCPEICWEGVYNDAFLIDRINWISAGVFLDSNQTAENPVFTVFKDNEILYRAQLASEDTNAQKTITNCFLLKNKIWCISLVEIYDTGDNVIRPKLFAVKIPEQC

SEQ ID NO: 33 - protein, 555 aa, Artificial Sequence
  Hendra virus G protein (Without cytoplasmic tail)
FNTVIALLGSIIIIVMNIMIIQNYTRTTDNQALIKESLQSVQQQIKALTDKIGTEIGPKVSLIDTSSTITIPANIGLLGSKISQSTSSINENVNDKCKFTLPPLKIHECNISCPNPLPFREYRPISQGVSDLVGLPNQICLQKTTSTILKPRLISYTLPINTREGVCITDPLLAVDNGFFAYSHLEKIGSCTRGIAKQRIIGVGEVLDRGDKVPSMFMTNVWTPPNPSTIHHCSSTYHEDFYYTLCAVSHVGDPILNSTSWTESLSLIRLAVRPKSDSGDYNQKYIAITKVERGKYDKVMPYGPSGIKQGDTLYFPAVGFLPRTEFQYNDSNCPIIHCKYSKAENCRLSMGVNSKSHYILRSGLLKYNLSLGGDIILQFIEIADNRLTIGSPSKIYNSLGQPVFYQASYSWDTMIKLGDVDTVDPLRVQWRNNSVISRPGQSQCPRFNVCPEVCWEGTYNDAFLIDRLNWVSAGVYLNSNQTAENPVFAVFKDNEILYQVPLAEDDTNAQKTITDCFLLENVIWCISLVEIYDTGDSVIRPKLFAVKIPAQCSES

SEQ ID NO: 34 - protein, 26 aa, Artificial Sequence
  signal sequence
MVVILDKRCYCNLLILILMISECSVG

SEQ ID NO: 35 - protein, 597 aa, Artificial Sequence
  NiVG protein attachment glycoprotein Truncated delta5
MKVRFENTTSDKGKIPSKVIKSYYGTMDIKKINEGLLDSKILSAFNTVIALLGSIVIIVMNIMIIQNYTRSTDNQAVIKDALQGIQQQIKGLADKIGTEIGPKVSLIDTSSTITIPANIGLLGSKISQSTASINENVNEKCKFTLPPLKIHECNISCPNPLPFREYRPQTEGVSNLVGLPNNICLQKTSNQILKPKLISYTLPVVGQSGTCITDPLLAMDEGYFAYSHLERIGSCSRGVSKQRIIGVGEVLDRGDEVPSLFMTNVWTPPNPNTVYHCSAVYNNEFYYVLCAVSTVGDPILNSTYWSGSLMMTRLAVKPKSNGGGYNQHQLALRSIEKGRYDKVMPYGPSGIKQGDTLYFPAVGFLVRTEFKYNDSNCPITKCQYSKPENCRLSMGIRPNSHYILRSGLLKYNLSDGENPKVVFIEISDQRLSIGSPSKIYDSLGQPVFYQASFSWDTMIKFGDVLTVNPLVVNWRNNTVISRPGQSQCPRFNTCPEICWEGVYNDAFLIDRINWISAGVFLDSNQTAENPVFTVFKDNEILYRAQLASEDTNAQKTITNCFLLKNKIWCISLVEIYDTGDNVIRPKLFAVKIPEQCT

SEQ ID NO: 36 - protein, 592 aa, Artificial Sequence
  NiVG protein attachment glycoprotein Truncated delta10
MNTTSDKGKIPSKVIKSYYGTMDIKKINEGLLDSKILSAFNTVIALLGSIVIIVMNIMIIQNYTRSTDNQAVIKDALQGIQQQIKGLADKIGTEIGPKVSLIDTSSTITIPANIGLLGSKISQSTASINENVNEKCKFTLPPLKIHECNISCPNPLPFREYRPQTEGVSNLVGLPNNICLQKTSNQILKPKLISYTLPVVGQSGTCITDPLLAMDEGYFAYSHLERIGSCSRGVSKQRIIGVGEVLDRGDEVPSLFMTNVWTPPNPNTVYHCSAVYNNEFYYVLCAVSTVGDPILNSTYWSGSLMMTRLAVKPKSNGGGYNQHQLALRSIEKGRYDKVMPYGPSGIKQGDTLYFPAVGFLVRTEFKYNDSNCPITKCQYSKPENCRLSMGIRPNSHYILRSGLLKYNLSDGENPKVVFIEISDQRLSIGSPSKIYDSLGQPVFYQASFSWDTMIKFGDVLTVNPLVVNWRNNTVISRPGQSQCPRFNTCPEICWEGVYNDAFLIDRINWISAGVFLDSNQTAENPVFTVFKDNEILYRAQLASEDTNAQKTITNCFLLKNKIWCISLVEIYDTGDNVIRPKLFAVKIPEQCT

SEQ ID NO: 37 - protein, 587 aa, Artificial Sequence
  NiVG protein attachment glycoprotein Truncated delta15
MKGKIPSKVIKSYYGTMDIKKINEGLLDSKILSAFNTVIALLGSIVIIVMNIMIIQNYTRSTDNQAVIKDALQGIQQQIKGLADKIGTEIGPKVSLIDTSSTITIPANIGLLGSKISQSTASINENVNEKCKFTLPPLKIHECNISCPNPLPFREYRPQTEGVSNLVGLPNNICLQKTSNQILKPKLISYTLPVVGQSGTCITDPLLAMDEGYFAYSHLERIGSCSRGVSKQRIIGVGEVLDRGDEVPSLFMTNVWTPPNPNTVYHCSAVYNNEFYYVLCAVSTVGDPILNSTYWSGSLMMTRLAVKPKSNGGGYNQHQLALRSIEKGRYDKVMPYGPSGIKQGDTLYFPAVGFLVRTEFKYNDSNCPITKCQYSKPENCRLSMGIRPNSHYILRSGLLKYNLSDGENPKVVFIEISDQRLSIGSPSKIYDSLGQPVFYQASFSWDTMIKFGDVLTVNPLVVNWRNNTVISRPGQSQCPRFNTCPEICWEGVYNDAFLIDRINWISAGVFLDSNQTAENPVFTVFKDNEILYRAQLASEDTNAQKTITNCFLLKNKIWCISLVEIYDTGDNVIRPKLFAVKIPEQCT

SEQ ID NO: 38 - protein, 582 aa, Artificial Sequence
  NiVG protein attachment glycoprotein Truncated delta20
MSKVIKSYYGTMDIKKINEGLLDSKILSAFNTVIALLGSIVIIVMNIMIIQNYTRSTDNQAVIKDALQGIQQQIKGLADKIGTEIGPKVSLIDTSSTITIPANIGLLGSKISQSTASINENVNEKCKFTLPPLKIHECNISCPNPLPFREYRPQTEGVSNLVGLPNNICLQKTSNQILKPKLISYTLPVVGQSGTCITDPLLAMDEGYFAYSHLERIGSCSRGVSKQRIIGVGEVLDRGDEVPSLFMTNVWTPPNPNTVYHCSAVYNNEFYYVLCAVSTVGDPILNSTYWSGSLMMTRLAVKPKSNGGGYNQHQLALRSIEKGRYDKVMPYGPSGIKQGDTLYFPAVGFLVRTEFKYNDSNCPITKCQYSKPENCRLSMGIRPNSHYILRSGLLKYNLSDGENPKVVFIEISDQRLSIGSPSKIYDSLGQPVFYQASFSWDTMIKFGDVLTVNPLVVNWRNNTVISRPGQSQCPRFNTCPEICWEGVYNDAFLIDRINWISAGVFLDSNQTAENPVFTVFKDNEILYRAQLASEDTNAQKTITNCFLLKNKIWCISLVEIYDTGDNVIRPKLFAVKIPEQCT

SEQ ID NO: 39 - protein, 577 aa, Artificial Sequence
  NiVG protein attachment glycoprotein Truncated delta25
MSYYGTMDIKKINEGLLDSKILSAFNTVIALLGSIVIIVMNIMIIQNYTRSTDNQAVIKDALQGIQQQIKGLADKIGTEIGPKVSLIDTSSTITIPANIGLLGSKISQSTASINENVNEKCKFTLPPLKIHECNISCPNPLPFREYRPQTEGVSNLVGLPNNICLQKTSNQILKPKLISYTLPVVGQSGTCITDPLLAMDEGYFAYSHLERIGSCSRGVSKQRIIGVGEVLDRGDEVPSLFMTNVWTPPNPNTVYHCSAVYNNEFYYVLCAVSTVGDPILNSTYWSGSLMMTRLAVKPKSNGGGYNQHQLALRSIEKGRYDKVMPYGPSGIKQGDTLYFPAVGFLVRTEFKYNDSNCPITKCQYSKPENCRLSMGIRPNSHYILRSGLLKYNLSDGENPKVVFIEISDQRLSIGSPSKIYDSLGQPVFYQASFSWDTMIKFGDVLTVNPLVVNWRNNTVISRPGQSQCPRFNTCPEICWEGVYNDAFLIDRINWISAGVFLDSNQTAENPVFTVFKDNEILYRAQLASEDTNAQKTITNCFLLKNKIWCISLVEIYDTGDNVIRPKLFAVKIPEQCT

SEQ ID NO: 40 - protein, 573 aa, Artificial Sequence
  NiVG protein attachment glycoprotein Truncated delta30
MTMDIKKINEGLLDSKILSAFNTVIALLGSIVIIVMNIMIIQNYTRSTDNQAVIKDALQGIQQQIKGLADKIGTEIGPKVSLIDTSSTITIPANIGLLGSKISQSTASINENVNEKCKFTLPPLKIHECNISCPNPLPFREYRPQTEGVSNLVGLPNNICLQKTSNQILKPKLISYTLPVVGQSGTCITDPLLAMDEGYFAYSHLERIGSCSRGVSKQRIIGVGEVLDRGDEVPSLFMTNVWTPPNPNTVYHCSAVYNNEFYYVLCAVSTVGDPILNSTYWSGSLMMTRLAVKPKSNGGGYNQHQLALRSIEKGRYDKVMPYGPSGIKQGDTLYFPAVGFLVRTEFKYNDSNCPITKCQYSKPENCRLSMGIRPNSHYILRSGLLKYNLSDGENPKVVFIEISDQRLSIGSPSKIYDSLGQPVFYQASFSWDTMIKFGDVLTVNPLVVNWRNNTVISRPGQSQCPRFNTCPEICWEGVYNDAFLIDRINWISAGVFLDSNQTAENPVFTVFKDNEILYRAQLASEDTNAQKTITNCFLLKNKIWCISLVEIYDTGDNVIRPKLFAVKIPEQCT

SEQ ID NO: 41 - protein, 6 aa, Artificial Sequence
  Peptide linker
GGGGGS

SEQ ID NO: 42 - protein, 5 aa, Artificial Sequence
  Peptide linker
  REPEAT (1)...(5): Repeated 1 to 10 times
GGGGS

SEQ ID NO: 43 - protein, 5 aa, Artificial Sequence
  Peptide linker
GGGGS

SEQ ID NO: 44 - protein, 600 aa, Artificial Sequence
  NiVG protein attachment glycoprotein (without N-terminal methionine)
PAENKKVRFENTTSDKGKIPSKVIKSYYGTMDIKKINEGLLDSKILSAFNTVIALLGSIVIIVMNIMIIQNYTRSTDNQAVIKDALQGIQQQIKGLADKIGTEIGPKVSLIDTSSTITIPANIGLLGSKISQSTASINENVNEKCKFTLPPLKIHECNISCPNPLPFREYRPQTEGVSNLVGLPNNICLQKTSNQILKPKLISYTLPVVGQSGTCITDPLLAMDEGYFAYSHLERIGSCSRGVSKQRIIGVGEVLDRGDEVPSLFMTNVWTPPNPNTVYHCSAVYNNEFYYVLCAVSTVGDPILNSTYWSGSLMMTRLAVKPKSNGGGYNQHQLALRSIEKGRYDKVMPYGPSGIKQGDTLYFPAVGFLVRTEFKYNDSNCPITKCQYSKPENCRLSMGIRPNSHYILRSGLLKYNLSDGENPKVVFIEISDQRLSIGSPSKIYDSLGQPVFYQASFSWDTMIKFGDVLTVNPLVVNWRNNTVISRPGQSQCPRFNTCPEICWEGVYNDAFLIDRINWISAGVFLDSNQTAENPVFTVFKDNEILYRAQLASEDTNAQKTITNCFLLKNKIWCISLVEIYDTGDNVIRPKLFAVKIPEQC

SEQ ID NO: 45 - protein, 595 aa, Artificial Sequence
  NiVG protein attachment glycoprotein Truncated delta5 Without N-terminal methionine
KVRFENTTSDKGKIPSKVIKSYYGTMDIKKINEGLLDSKILSAFNTVIALLGSIVIIVMNIMIIQNYTRSTDNQAVIKDALQGIQQQIKGLADKIGTEIGPKVSLIDTSSTITIPANIGLLGSKISQSTASINENVNEKCKFTLPPLKIHECNISCPNPLPFREYRPQTEGVSNLVGLPNNICLQKTSNQILKPKLISYTLPVVGQSGTCITDPLLAMDEGYFAYSHLERIGSCSRGVSKQRIIGVGEVLDRGDEVPSLFMTNVWTPPNPNTVYHCSAVYNNEFYYVLCAVSTVGDPILNSTYWSGSLMMTRLAVKPKSNGGGYNQHQLALRSIEKGRYDKVMPYGPSGIKQGDTLYFPAVGFLVRTEFKYNDSNCPITKCQYSKPENCRLSMGIRPNSHYILRSGLLKYNLSDGENPKVVFIEISDQRLSIGSPSKIYDSLGQPVFYQASFSWDTMIKFGDVLTVNPLVVNWRNNTVISRPGQSQCPRFNTCPEICWEGVYNDAFLIDRINWISAGVFLDSNQTAENPVFTVFKDNEILYRAQLASEDTNAQKTITNCFLLKNKIWCISLVEIYDTGDNVIRPKLFAVKIPEQC

SEQ ID NO: 46 - protein, 590 aa, Artificial Sequence
  NiVG protein attachment glycoprotein Truncated delta10 Without N-terminal methionine
NTTSDKGKIPSKVIKSYYGTMDIKKINEGLLDSKILSAFNTVIALLGSIVIIVMNIMIIQNYTRSTDNQAVIKDALQGIQQQIKGLADKIGTEIGPKVSLIDTSSTITIPANIGLLGSKISQSTASINENVNEKCKFTLPPLKIHECNISCPNPLPFREYRPQTEGVSNLVGLPNNICLQKTSNQILKPKLISYTLPVVGQSGTCITDPLLAMDEGYFAYSHLERIGSCSRGVSKQRIIGVGEVLDRGDEVPSLFMTNVWTPPNPNTVYHCSAVYNNEFYYVLCAVSTVGDPILNSTYWSGSLMMTRLAVKPKSNGGGYNQHQLALRSIEKGRYDKVMPYGPSGIKQGDTLYFPAVGFLVRTEFKYNDSNCPITKCQYSKPENCRLSMGIRPNSHYILRSGLLKYNLSDGENPKVVFIEISDQRLSIGSPSKIYDSLGQPVFYQASFSWDTMIKFGDVLTVNPLVVNWRNNTVISRPGQSQCPRFNTCPEICWEGVYNDAFLIDRINWISAGVFLDSNQTAENPVFTVFKDNEILYRAQLASEDTNAQKTITNCFLLKNKIWCISLVEIYDTGDNVIRPKLFAVKIPEQC

SEQ ID NO: 47 - protein, 585 aa, Artificial Sequence
  NiVG protein attachment glycoprotein Truncated delta15 Without N-terminal methionine
KGKIPSKVIKSYYGTMDIKKINEGLLDSKILSAFNTVIALLGSIVIIVMNIMIIQNYTRSTDNQAVIKDALQGIQQQIKGLADKIGTEIGPKVSLIDTSSTITIPANIGLLGSKISQSTASINENVNEKCKFTLPPLKIHECNISCPNPLPFREYRPQTEGVSNLVGLPNNICLQKTSNQILKPKLISYTLPVVGQSGTCITDPLLAMDEGYFAYSHLERIGSCSRGVSKQRIIGVGEVLDRGDEVPSLFMTNVWTPPNPNTVYHCSAVYNNEFYYVLCAVSTVGDPILNSTYWSGSLMMTRLAVKPKSNGGGYNQHQLALRSIEKGRYDKVMPYGPSGIKQGDTLYFPAVGFLVRTEFKYNDSNCPITKCQYSKPENCRLSMGIRPNSHYILRSGLLKYNLSDGENPKVVFIEISDQRLSIGSPSKIYDSLGQPVFYQASFSWDTMIKFGDVLTVNPLVVNWRNNTVISRPGQSQCPRFNTCPEICWEGVYNDAFLIDRINWISAGVFLDSNQTAENPVFTVFKDNEILYRAQLASEDTNAQKTITNCFLLKNKIWCISLVEIYDTGDNVIRPKLFAVKIPEQC

SEQ ID NO: 48 - protein, 580 aa, Artificial Sequence
  NiVG protein attachment glycoprotein Truncated delta20 Without N-terminal methionine
SKVIKSYYGTMDIKKINEGLLDSKILSAFNTVIALLGSIVIIVMNIMIIQNYTRSTDNQAVIKDALQGIQQQIKGLADKIGTEIGPKVSLIDTSSTITIPANIGLLGSKISQSTASINENVNEKCKFTLPPLKIHECNISCPNPLPFREYRPQTEGVSNLVGLPNNICLQKTSNQILKPKLISYTLPVVGQSGTCITDPLLAMDEGYFAYSHLERIGSCSRGVSKQRIIGVGEVLDRGDEVPSLFMTNVWTPPNPNTVYHCSAVYNNEFYYVLCAVSTVGDPILNSTYWSGSLMMTRLAVKPKSNGGGYNQHQLALRSIEKGRYDKVMPYGPSGIKQGDTLYFPAVGFLVRTEFKYNDSNCPITKCQYSKPENCRLSMGIRPNSHYILRSGLLKYNLSDGENPKVVFIEISDQRLSIGSPSKIYDSLGQPVFYQASFSWDTMIKFGDVLTVNPLVVNWRNNTVISRPGQSQCPRFNTCPEICWEGVYNDAFLIDRINWISAGVFLDSNQTAENPVFTVFKDNEILYRAQLASEDTNAQKTITNCFLLKNKIWCISLVEIYDTGDNVIRPKLFAVKIPEQC

SEQ ID NO: 49 - protein, 575 aa, Artificial Sequence
  NiVG protein attachment glycoprotein Truncated delta25 Without N-terminal methionine
SYYGTMDIKKINEGLLDSKILSAFNTVIALLGSIVIIVMNIMIIQNYTRSTDNQAVIKDALQGIQQQIKGLADKIGTEIGPKVSLIDTSSTITIPANIGLLGSKISQSTASINENVNEKCKFTLPPLKIHECNISCPNPLPFREYRPQTEGVSNLVGLPNNICLQKTSNQILKPKLISYTLPVVGQSGTCITDPLLAMDEGYFAYSHLERIGSCSRGVSKQRIIGVGEVLDRGDEVPSLFMTNVWTPPNPNTVYHCSAVYNNEFYYVLCAVSTVGDPILNSTYWSGSLMMTRLAVKPKSNGGGYNQHQLALRSIEKGRYDKVMPYGPSGIKQGDTLYFPAVGFLVRTEFKYNDSNCPITKCQYSKPENCRLSMGIRPNSHYILRSGLLKYNLSDGENPKVVFIEISDQRLSIGSPSKIYDSLGQPVFYQASFSWDTMIKFGDVLTVNPLVVNWRNNTVISRPGQSQCPRFNTCPEICWEGVYNDAFLIDRINWISAGVFLDSNQTAENPVFTVFKDNEILYRAQLASEDTNAQKTITNCFLLKNKIWCISLVEIYDTGDNVIRPKLFAVKIPEQC

SEQ ID NO: 50 - protein, 571 aa, Artificial Sequence
  NiVG protein attachment glycoprotein Truncated delta30 Without N-terminal methionine
TMDIKKINEGLLDSKILSAFNTVIALLGSIVIIVMNIMIIQNYTRSTDNQAVIKDALQGIQQQIKGLADKIGTEIGPKVSLIDTSSTITIPANIGLLGSKISQSTASINENVNEKCKFTLPPLKIHECNISCPNPLPFREYRPQTEGVSNLVGLPNNICLQKTSNQILKPKLISYTLPVVGQSGTCITDPLLAMDEGYFAYSHLERIGSCSRGVSKQRIIGVGEVLDRGDEVPSLFMTNVWTPPNPNTVYHCSAVYNNEFYYVLCAVSTVGDPILNSTYWSGSLMMTRLAVKPKSNGGGYNQHQLALRSIEKGRYDKVMPYGPSGIKQGDTLYFPAVGFLVRTEFKYNDSNCPITKCQYSKPENCRLSMGIRPNSHYILRSGLLKYNLSDGENPKVVFIEISDQRLSIGSPSKIYDSLGQPVFYQASFSWDTMIKFGDVLTVNPLVVNWRNNTVISRPGQSQCPRFNTCPEICWEGVYNDAFLIDRINWISAGVFLDSNQTAENPVFTVFKDNEILYRAQLASEDTNAQKTITNCFLLKNKIWCISLVEIYDTGDNVIRPKLFAVKIPEQC

SEQ ID NO: 51 - protein, 568 aa, Artificial Sequence
  NiVG protein attachment glycoprotein Truncated and mutated Without N-terminal methionine
KKINEGLLDSKILSAFNTVIALLGSIVIIVMNIMIIQNYTRSTDNQAVIKDALQGIQQQIKGLADKIGTEIGPKVSLIDTSSTITIPANIGLLGSKISQSTASINENVNEKCKFTLPPLKIHECNISCPNPLPFREYRPQTEGVSNLVGLPNNICLQKTSNQILKPKLISYTLPVVGQSGTCITDPLLAMDEGYFAYSHLERIGSCSRGVSKQRIIGVGEVLDRGDEVPSLFMTNVWTPPNPNTVYHCSAVYNNEFYYVLCAVSTVGDPILNSTYWSGSLMMTRLAVKPKSNGGGYNQHQLALRSIEKGRYDKVMPYGPSGIKQGDTLYFPAVGFLVRTEFKYNDSNCPITKCQYSKPENCRLSMGIRPNSHYILRSGLLKYNLSDGENPKVVFIEISDQRLSIGSPSKIYDSLGQPVFYQASFSWDTMIKFGDVLTVNPLVVNWRNNTVISRPGQSQCPRFNTCPAICAEGVYNDAFLIDRINWISAGVFLDSNATAANPVFTVFKDNEILYRAQLASEDTNAQKTITNCFLLKNKIWCISLVEIYDTGDNVIRPKLFAVKIPEQCT

SEQ ID NO: 52 - protein, 603 aa, Artificial Sequence
  Hendra virus G protein  Without N-terminal methionine
MADSKLVSLNNNLSGKIKDQGKVIKNYYGTMDIKKINDGLLDSKILGAFNTVIALLGSIIIIVMNIMIIQNYTRTTDNQALIKESLQSVQQQIKALTDKIGTEIGPKVSLIDTSSTITIPANIGLLGSKISQSTSSINENVNDKCKFTLPPLKIHECNISCPNPLPFREYRPISQGVSDLVGLPNQICLQKTTSTILKPRLISYTLPINTREGVCITDPLLAVDNGFFAYSHLEKIGSCTRGIAKQRIIGVGEVLDRGDKVPSMFMTNVWTPPNPSTIHHCSSTYHEDFYYTLCAVSHVGDPILNSTSWTESLSLIRLAVRPKSDSGDYNQKYIAITKVERGKYDKVMPYGPSGIKQGDTLYFPAVGFLPRTEFQYNDSNCPIIHCKYSKAENCRLSMGVNSKSHYILRSGLLKYNLSLGGDIILQFIEIADNRLTIGSPSKIYNSLGQPVFYQASYSWDTMIKLGDVDTVDPLRVQWRNNSVISRPGQSQCPRFNVCPEVCWEGTYNDAFLIDRLNWVSAGVYLNSNQTAENPVFAVFKDNEILYQVPLAEDDTNAQKTITDCFLLENVIWCISLVEIYDTGDSVIRPKLFAVKIPAQCSES

SEQ ID NO: 53 - protein, 568 aa, Artificial Sequence
  NiVG protein attachment glycoprotein Truncated (Gc delta34) Without N-terminal methionine
KKINEGLLDSKILSAFNTVIALLGSIVIIVMNIMIIQNYTRSTDNQAVIKDALQGIQQQIKGLADKIGTEIGPKVSLIDTSSTITIPANIGLLGSKISQSTASINENVNEKCKFTLPPLKIHECNISCPNPLPFREYRPQTEGVSNLVGLPNNICLQKTSNQILKPKLISYTLPVVGQSGTCITDPLLAMDEGYFAYSHLERIGSCSRGVSKQRIIGVGEVLDRGDEVPSLFMTNVWTPPNPNTVYHCSAVYNNEFYYVLCAVSTVGDPILNSTYWSGSLMMTRLAVKPKSNGGGYNQHQLALRSIEKGRYDKVMPYGPSGIKQGDTLYFPAVGFLVRTEFKYNDSNCPITKCQYSKPENCRLSMGIRPNSHYILRSGLLKYNLSDGENPKVVFIEISDQRLSIGSPSKIYDSLGQPVFYQASFSWDTMIKFGDVLTVNPLVVNWRNNTVISRPGQSQCPRFNTCPEICWEGVYNDAFLIDRINWISAGVFLDSNQTAENPVFTVFKDNEILYRAQLASEDTNAQKTITNCFLLKNKIWCISLVEIYDTGDNVIRPKLFAVKIPEQCT

SEQ ID NO: 54 - protein, 621 aa, Artificial Sequence
  Cedar virus without N terminal methionine
LSQLQKNYLDNSNQQGDKMNNPDKKLSVNFNPLELDKGQKDLNKSYYVKNKNYNVSNLLNESLHDIKFCIYCIFSLLIIITIINIITISIVITRLKVHEENNGMESPNLQSIQDSLSSLTNMINTEITPRIGILVTATSVTLSSSINYVGTKTNQLVNELKDYITKSCGFKVPELKLHECNISCADPKISKSAMYSTNAYAELAGPPKIFCKSVSKDPDFRLKQIDYVIPVQQDRSICMNNPLLDISDGFFTYIHYEGINSCKKSDSFKVLLSHGEIVDRGDYRPSLYLLSSHYHPYSMQVINCVPVTCNQSSFVFCHISNNTKTLDNSDYSSDEYYITYFNGIDRPKTKKIPINNMTADNRYIHFTFSGGGGVCLGEEFIIPVTTVINTDVFTHDYCESFNCSVQTGKSLKEICSESLRSPTNSSRYNLNGIMIISQNNMTDFKIQLNGITYNKLSFGSPGRLSKTLGQVLYYQSSMSWDTYLKAGFVEKWKPFTPNWMNNTVISRPNQGNCPRYHKCPEICYGGTYNDIAPLDLGKDMYVSVILDSDQLAENPEITVFNSTTILYKERVSKDELNTRSTTTSCFLFLDEPWCISVLETNRFNGKSIRPEIYSYKIPKYC

SEQ ID NO: 55 - protein, 631 aa, Artificial Sequence
  Bat Paramyxovirus  without N terminal methionine
PQKTVEFINMNSPLERGVSTLSDKKTLNQSKITKQGYFGLGSHSERNWKKQKNQNDHYMTVSTMILEILVVLGIMFNLIVLTMVYYQNDNINQRMAELTSNITVLNLNLNQLTNKIQREIIPRITLIDTATTITIPSAITYILATLTTRISELLPSINQKCEFKTPTLVLNDCRINCTPPLNPSDGVKMSSLATNLVAHGPSPCRNFSSVPTIYYYRIPGLYNRTALDERCILNPRLTISSTKFAYVHSEYDKNCTRGFKYYELMTFGEILEGPEKEPRMFSRSFYSPTNAVNYHSCTPIVTVNEGYFLCLECTSSDPLYKANLSNSTFHLVILRHNKDEKIVSMPSFNLSTDQEYVQIIPAEGGGTAESGNLYFPCIGRLLHKRVTHPLCKKSNCSRTDDESCLKSYYNQGSPQHQVVNCLIRIRNAQRDNPTWDVITVDLTNTYPGSRSRIFGSFSKPMLYQSSVSWHTLLQVAEITDLDKYQLDWLDTPYISRPGGSECPFGNYCPTVCWEGTYNDVYSLTPNNDLFVTVYLKSEQVAENPYFAIFSRDQILKEFPLDAWISSARTTTISCFMFNNEIWCIAALEITRLNDDIIRPIYYSFWLPTDCRTPYPHTGKMTRVPLRSTYNY

SEQ ID NO: 56 - protein, 624 aa, Artificial Sequence
  Mojiang virus| without N terminal methionine
ATNRDNTITSAEVSQEDKVKKYYGVETAEKVADSISGNKVFILMNTLLILTGAIITITLNITNLTAAKSQQNMLKIIQDDVNAKLEMFVNLDQLVKGEIKPKVSLINTAVSVSIPGQISNLQTKFLQKYVYLEESITKQCTCNPLSGIFPTSGPTYPPTDKPDDDTTDDDKVDTTIKPIEYPKPDGCNRTGDHFTMEPGANFYTVPNLGPASSNSDECYTNPSFSIGSSIYMFSQEIRKTDCTAGEILSIQIVLGRIVDKGQQGPQASPLLVWAVPNPKIINSCAVAAGDEMGWVLCSVTLTAASGEPIPHMFDGFWLYKLEPDTEVVSYRITGYAYLLDKQYDSVFIGKGGGIQKGNDLYFQMYGLSRNRQSFKALCEHGSCLGTGGGGYQVLCDRAVMSFGSEESLITNAYLKVNDLASGKPVIIGQTFPPSDSYKGSNGRMYTIGDKYGLYLAPSSWNRYLRFGITPDISVRSTTWLKSQDPIMKILSTCTNTDRDMCPEICNTRGYQDIFPLSEDSEYYTYIGITPNNGGTKNFVAVRDSDGHIASIDILQNYYSITSATISCFMYKDEIWCIAITEGKKQKDNPQRIYAHSYKIRQMCYNMKSATVTVGNAKNITIRRY

SEQ ID NO: 57 - protein, 530 aa, Artificial Sequence
  Cedar virus without N terminal methionine
DFDKLNKIGVVQGRVLNYKIKGDPMTKDLVLKFIPNIVNITECVREPLSRYNETVRRLLLPIHNMLGLYLNNTNAKMTGLMIAGVIMGGIAIGIATAAQITAGFALYEAKKNTENIQKLTDSIMKTQDSIDKLTDSVGTSILILNKLQTYINNQLVPNLELLSCRQNKIEFDLMLTKYLVDLMTVIGPNINNPVNKDMTIQSLSLLFDGNYDIMMSELGYTPQDFLDLIESKSITGQIIYVDMENLYVVIRTYLPTLIEVPDAQIYEFNKITMSSNGGEYLSTIPNFILIRGNYMSNIDVATCYMTKASVICNQDYSLPMSQNLRSCYQGETEYCPVEAVIASHSPRFALTNGVIFANCINTICRCQDNGKTITQNINQFVSMIDNSTCNDVMVDKFTIKVGKYMGRKDINNINIQIGPQIIIDKVDLSNEINKMNQSLKDSIFYLREAKRILDSVNISLISPSVQLFLIIISVLSFIILLIIIVYLYCKSKHSYKYNKFIDDPDYYNDYKRERINGKASKSNNIYYVGD

SEQ ID NO: 58 - protein, 640 aa, Artificial Sequence
  Bat Paramyxovirus  without N terminal methionine
SRALLRETDNYSNGLIVENLVRNCHHPSKNNLNYTKTQKRDSTIPYRVEERKGHYPKIKHLIDKSYKHIKRGKRRNGHNGNIITIILLLILILKTQMSEGAIHYETLSKIGLIKGITREYKVKGTPSSKDIVIKLIPNVTGLNKCTNISMENYKEQLDKILIPINNIIELYANSTKSAPGNARFAGVIIAGVALGVAAAAQITAGIALHEARQNAERINLLKDSISATNNAVAELQEATGGIVNVITGMQDYINTNLVPQIDKLQCSQIKTALDISLSQYYSEILTVFGPNLQNPVTTSMSIQAISQSFGGNIDLLLNLLGYTANDLLDLLESKSITGQITYINLEHYFMVIRVYYPIMTTISNAYVQELIKISFNVDGSEWVSLVPSYILIRNSYLSNIDISECLITKNSVICRHDFAMPMSYTLKECLTGDTEKCPREAVVTSYVPRFAISGGVIYANCLSTTCQCYQTGKVIAQDGSQTLMMIDNQTCSIVRIEEILISTGKYLGSQEYNTMHVSVGNPVFTDKLDITSQISNINQSIEQSKFYLDKSKAILDKINLNLIGSVPISILFIIAILSLILSIITFVIVMIIVRRYNKYTPLINSDPSSRRSTIQDVYIIPNPGEHSIRSAARSIDRDRD

SEQ ID NO: 59 - protein, 520 aa, Artificial Sequence
  Hendra virus F protein without N terminal methionine
ILHYEKLSKIGLVKGITRKYKIKSNPLTKDIVIKMIPNVSNVSKCTGTVMENYKSRLTGILSPIKGAIELYNNNTHDLVGDVKLAGVVMAGIAIGIATAAQITAGVALYEAMKNADNINKLKSSIESTNEAVVKLQETAEKTVYVLTALQDYINTNLVPTIDQISCKQTELALDLALSKYLSDLLFVFGPNLQDPVSNSMTIQAISQAFGGNYETLLRTLGYATEDFDDLLESDSIAGQIVYVDLSSYYIIVRVYFPILTEIQQAYVQELLPVSFNNDNSEWISIVPNFVLIRNTLISNIEVKYCLITKKSVICNQDYATPMTASVRECLTGSTDKCPRELVVSSHVPRFALSGGVLFANCISVTCQCQTTGRAISQSGEQTLLMIDNTTCTTVVLGNIIISLGKYLGSINYNSESIAVGPPVYTDKVDISSQISSMNQSLQQSKDYIKEAQKILDTVNPSLISMLSMIILYVLSIAALCIGLITFISFVIVEKKRGNYSRLDDRQVRPVSNGDLYYIGT

SEQ ID NO: 60 - protein, 519 aa, Artificial Sequence
  Mojiang virus Fusion protein without N terminal methionine
IHYDSLSKVGVIKGLTYNYKIKGSPSTKLMVVKLIPNIDSVKNCTQKQYDEYKNLVRKALEPVKMAIDTMLNNVKSGNNKYRFAGAIMAGVALGVATAATVTAGIALHRSNENAQAIANMKSAIQNTNEAVKQLQLANKQTLAVIDTIRGEINNNIIPVINQLSCDTIGLSVGIRLTQYYSEIITAFGPALQNPVNTRITIQAISSVFNGNFDELLKIMGYTSGDLYEILHSELIRGNIIDVDVDAGYIALEIEFPNLTLVPNAVVQELMPISYNIDGDEWVTLVPRFVLTRTTLLSNIDTSRCTITDSSVICDNDYALPMSHELIGCLQGDTSKCAREKVVSSYVPKFALSDGLVYANCLNTICRCMDTDTPISQSLGATVSLLDNKRCSVYQVGDVLISVGSYLGDGEYNADNVELGPPIVIDKIDIGNQLAGINQTLQEAEDYIEKSEEFLKGVNPSIITLGSMVVLYIFMILIAIVSVIALVLSIKLTVKGNVVRQQFTYTQHVPSMENINYVSH

SEQ ID NO: 61 - protein, 354 aa, Artificial Sequence
  OTC
MLFNLRILLNNAAFRNGHNFMVRNFRCGQPLQNKVQLKGRDLLTLKNFTGEEIKYMLWLSADLKFRIKQKGEYLPLLQGKSLGMIFEKRSTRTRLSTETGFALLGGHPCFLTTQDIHLGVNESLTDTARVLSSMADAVLARVYKQSDLDTLAKEASIPIINGLSDLYHPIQILADYLTLQEHYSSLKGLTLSWIGDGNNILHSIMMSAAKFGMHLQAATPKGYEPDASVTKLAEQYAKENGTKLLLTNDPLEAAHGGNVLITDTWISMGQEEEKKKRLQAFQGYQVTMKTAKVAASDWTFLHCLPRKPEEVDDEVFYSPRSLVFPEAENRKWTIMAVMVSLLTDYSPQLQKPKF

SEQ ID NO: 62 - protein, 1500 aa, Artificial Sequence
  CPS1
MTRILTAFKVVRTLKTGFGFTNVTAHQKWKFSRPGIRLLSVKAQTAHIVLEDGTKMKGYSFGHPSSVAGEVVFNTGLGGYPEAITDPAYKGQILTMANPIIGNGGAPDTTALDELGLSKYLESNGIKVSGLLVLDYSKDYNHWLATKSLGQWLQEEKVPAIYGVDTRMLTKIIRDKGTMLGKIEFEGQPVDFVDPNKQNLIAEVSTKDVKVYGKGNPTKVVAVDCGIKNNVIRLLVKRGAEVHLVPWNHDFTKMEYDGILIAGGPGNPALAEPLIQNVRKILESDRKEPLFGISTGNLITGLAAGAKTYKMSMANRGQNQPVLNITNKQAFITAQNHGYALDNTLPAGWKPLFVNVNDQTNEGIMHESKPFFAVQFHPEVTPGPIDTEYLFDSFFSLIKKGKATTITSVLPKPALVASRVEVSKVLILGSGGLSIGQAGEFDYSGSQAVKAMKEENVKTVLMNPNIASVQTNEVGLKQADTVYFLPITPQFVTEVIKAEQPDGLILGMGGQTALNCGVELFKRGVLKEYGVKVLGTSVESIMATEDRQLFSDKLNEINEKIAPSFAVESIEDALKAADTIGYPVMIRSAYALGGLGSGICPNRETLMDLSTKAFAMTNQILVEKSVTGWKEIEYEVVRDADDNCVTVCNMENVDAMGVHTGDSVVVAPAQTLSNAEFQMLRRTSINVVRHLGIVGECNIQFALHPTSMEYCIIEVNARLSRSSALASKATGYPLAFIAAKIALGIPLPEIKNVVSGKTSACFEPSLDYMVTKIPRWDLDRFHGTSSRIGSSMKSVGEVMAIGRTFEESFQKALRMCHPSIEGFTPRLPMNKEWPSNLDLRKELSEPSSTRIYAIAKAIDDNMSLDEIEKLTYIDKWFLYKMRDILNMEKTLKGLNSESMTEETLKRAKEIGFSDKQISKCLGLTEAQTRELRLKKNIHPWVKQIDTLAAEYPSVTNYLYVTYNGQEHDVNFDDHGMMVLGCGPYHIGSSVEFDWCAVSSIRTLRQLGKKTVVVNCNPETVSTDFDECDKLYFEELSLERILDIYHQEACGGCIISVGGQIPNNLAVPLYKNGVKIMGTSPLQIDRAEDRSIFSAVLDELKVAQAPWKAVNTLNEALEFAKSVDYPCLLRPSYVLSGSAMNVVFSEDEMKKFLEEATRVSQEHPVVLTKFVEGAREVEMDAVGKDGRVISHAISEHVEDAGVHSGDATLMLPTQTISQGAIEKVKDATRKIAKAFAISGPFNVQFLVKGNDVLVIECNLRASRSFPFVSKTLGVDFIDVATKVMIGENVDEKHLPTLDHPIIPADYVAIKAPMFSWPRLRDADPILRCEMASTGEVACFGEGIHTAFLKAMLSTGFKIPQKGILIGIQQSFRPRFLGVAEQLHNEGFKLFATEATSDWLNANNVPATPVAWPSQEGQNPSLSSIRKLIRDGSIDLVINLPNNNTKFVHDNYVIRRTAVDSGIPLLTNFQVTKLFAEAVQKSRKVDSKSLFHYRQYSAGKAA

SEQ ID NO: 63 - protein, 534 aa, Artificial Sequence
  NAGS
MATALMAVVLRAAAVAPRLRGRGGTGGARRLSCGARRRAARGTSPGRRLSTAWSQPQPPPEEYAGADDVSQSPVAEEPSWVPSPRPPVPHESPEPPSGRSLVQRDIQAFLNQCGASPGEARHWLTQFQTCHHSADKPFAVIEVDEEVLKCQQGVSSLAFALAFLQRMDMKPLVVLGLPAPTAPSGCLSFWEAKAQLAKSCKVLVDALRHNAAAAVPFFGGGSVLRAAEPAPHASYGGIVSVETDLLQWCLESGSIPILCPIGETAARRSVLLDSLEVTASLAKALRPTKIIFLNNTGGLRDSSHKVLSNVNLPADLDLVCNAEWVSTKERQQMRLIVDVLSRLPHHSSAVITAASTLLTELFSNKGSGTLFKNAERMLRVRSLDKLDQGRLVDLVNASFGKKLRDDYLASLRPRLHSIYVSEGYNAAAILTMEPVLGGTPYLDKFVVSSSRQGQGSGQMLWECLRRDLQTLFWRSRVTNPINPWYFKHSDGSFSNKQWIFFWFGLADIRDSYELVNHAKGLPDSFHKPASDPGS

SEQ ID NO: 64 - protein, 445 aa, Artificial Sequence
  BCKDHA
MAVAIAAARVWRLNRGLSQAALLLLRQPGARGLARSHPPRQQQQFSSLDDKPQFPGASAEFIDKLEFIQPNVISGIPIYRVMDRQGQIINPSEDPHLPKEKVLKLYKSMTLLNTMDRILYESQRQGRISFYMTNYGEEGTHVGSAAALDNTDLVFGQYREAGVLMYRDYPLELFMAQCYGNISDLGKGRQMPVHYGCKERHFVTISSPLATQIPQAVGAAYAAKRANANRVVICYFGEGAASEGDAHAGFNFAATLECPIIFFCRNNGYAISTPTSEQYRGDGIAARGPGYGIMSIRVDGNDVFAVYNATKEARRRAVAENQPFLIEAMTYRIGHHSTSDDSSAYRSVDEVNYWDKQDHPISRLRHYLLSQGWWDEEQEKAWRKQSRRKVMEAFEQAERKPKPNPNLLFSDVYQEMPAQLRKQQESLARHLQTYGEHYPLDHFDK

SEQ ID NO: 65 - protein, 392 aa, Artificial Sequence
  BCKDHB
MAVVAAAAGWLLRLRAAGAEGHWRRLPGAGLARGFLHPAATVEDAAQRRQVAHFTFQPDPEPREYGQTQKMNLFQSVTSALDNSLAKDPTAVIFGEDVAFGGVFRCTVGLRDKYGKDRVFNTPLCEQGIVGFGIGIAVTGATAIAEIQFADYIFPAFDQIVNEAAKYRYRSGDLFNCGSLTIRSPWGCVGHGALYHSQSPEAFFAHCPGIKVVIPRSPFQAKGLLLSCIEDKNPCIFFEPKILYRAAAEEVPIEPYNIPLSQAEVIQEGSDVTLVAWGTQVHVIREVASMAKEKLGVSCEVIDLRTIIPWDVDTICKSVIKTGRLLISHEAPLTGGFASEISSTVQEECFLNLEAPISRVCGYDTPFPHIFEPFYIPDKWKCYDALRKMINY

SEQ ID NO: 66 - protein, 482 aa, Artificial Sequence
  DBT
MAAVRMLRTWSRNAGKLICVRYFQTCGNVHVLKPNYVCFFGYPSFKYSHPHHFLKTTAALRGQVVQFKLSDIGEGIREVTVKEWYVKEGDTVSQFDSICEVQSDKASVTITSRYDGVIKKLYYNLDDIAYVGKPLVDIETEALKDSEEDVVETPAVSHDEHTHQEIKGRKTLATPAVRRLAMENNIKLSEVVGSGKDGRILKEDILNYLEKQTGAILPPSPKVEIMPPPPKPKDMTVPILVSKPPVFTGKDKTEPIKGFQKAMVKTMSAALKIPHFGYCDEIDLTELVKLREELKPIAFARGIKLSFMPFFLKAASLGLLQFPILNASVDENCQNITYKASHNIGIAMDTEQGLIVPNVKNVQICSIFDIATELNRLQKLGSVGQLSTTDLTGGTFTLSNIGSIGGTFAKPVIMPPEVAIGALGSIKAIPRFNQKGEVYKAQIMNVSWSADHRVIDGATMSRFSNLWKSYLENPAFMLLDLK

SEQ ID NO: 67 - protein, 509 aa, Artificial Sequence
  DLD
MQSWSRVYCSLAKRGHFNRISHGLQGLSAVPLRTYADQPIDADVTVIGSGPGGYVAAIKAAQLGFKTVCIEKNETLGGTCLNVGCIPSKALLNNSHYYHMAHGKDFASRGIEMSEVRLNLDKMMEQKSTAVKALTGGIAHLFKQNKVVHVNGYGKITGKNQVTATKADGGTQVIDTKNILIATGSEVTPFPGITIDEDTIVSSTGALSLKKVPEKMVVIGAGVIGVELGSVWQRLGADVTAVEFLGHVGGVGIDMEISKNFQRILQKQGFKFKLNTKVTGATKKSDGKIDVSIEAASGGKAEVITCDVLLVCIGRRPFTKNLGLEELGIELDPRGRIPVNTRFQTKIPNIYAIGDVVAGPMLAHKAEDEGIICVEGMAGGAVHIDYNCVPSVIYTHPEVAWVGKSEEQLKEEGIEYKVGKFPFAANSRAKTNADTDGMVKILGQKSTDRVLGAHILGPGAGEMVNEAALALEYGASCEDIARVCHAHPTLSEAFREANLAASFGKSINF

SEQ ID NO: 68 - protein, 750 aa, Artificial Sequence
  MUT
MLRAKNQLFLLSPHYLRQVKESSGSRLIQQRLLHQQQPLHPEWAALAKKQLKGKNPEDLIWHTPEGISIKPLYSKRDTMDLPEELPGVKPFTRGPYPTMYTFRPWTIRQYAGFSTVEESNKFYKDNIKAGQQGLSVAFDLATHRGYDSDNPRVRGDVGMAGVAIDTVEDTKILFDGIPLEKMSVSMTMNGAVIPVLANFIVTGEEQGVPKEKLTGTIQNDILKEFMVRNTYIFPPEPSMKIIADIFEYTAKHMPKFNSISISGYHMQEAGADAILELAYTLADGLEYSRTGLQAGLTIDEFAPRLSFFWGIGMNFYMEIAKMRAGRRLWAHLIEKMFQPKNSKSLLLRAHCQTSGWSLTEQDPYNNIVRTAIEAMAAVFGGTQSLHTNSFDEALGLPTVKSARIARNTQIIIQEESGIPKVADPWGGSYMMECLTNDVYDAALKLINEIEEMGGMAKAVAEGIPKLRIEECAARRQARIDSGSEVIVGVNKYQLEKEDAVEVLAIDNTSVRNRQIEKLKKIKSSRDQALAERCLAALTECAASGDGNILALAVDASRARCTVGEITDALKKVFGEHKANDRMVSGAYRQEFGESKEITSAIKRVHKFMEREGRRPRLLVAKMGQDGHDRGAKVIATGFADLGFDVDIGPLFQTPREVAQQAVDADVHAVGISTLAAGHKTLVPELIKELNSLGRPDILVMCGGVIPPQDYEFLFEVGVSNVFGPGTRIPKAAVQVLDDIEKCLEKKQQSV

SEQ ID NO: 69 - protein, 418 aa, Artificial Sequence
  MMAA
MPMLLPHPHQHFLKGLLRAPFRCYHFIFHSSTHLGSGIPCAQPFNSLGLHCTKWMLLSDGLKRKLCVQTTLKDHTEGLSDKEQRFVDKLYTGLIQGQRACLAEAITLVESTHSRKKELAQVLLQKVLLYHREQEQSNKGKPLAFRVGLSGPPGAGKSTFIEYFGKMLTERGHKLSVLAVDPSSCTSGGSLLGDKTRMTELSRDMNAYIRPSPTRGTLGGVTRTTNEAILLCEGAGYDIILIETVGVGQSEFAVADMVDMFVLLLPPAGGDELQGIKRGIIEMADLVAVTKSDGDLIVPARRIQAEYVSALKLLRKRSQVWKPKVIRISARSGEGISEMWDKMKDFQDLMLASGELTAKRRKQQKVWMWNLIQESVLEHFRTHPTVREQIPLLEQKVLIGALSPGLAADFLLKAFKSRD

SEQ ID NO: 70 - protein, 250 aa, Artificial Sequence
  MMAB
MAVCGLGSRLGLGSRLGLRGCFGAARLLYPRFQSRGPQGVEDGDRPQPSSKTPRIPKIYTKTGDKGFSSTFTGERRPKDDQVFEAVGTTDELSSAIGFALELVTEKGHTFAEELQKIQCTLQDVGSALATPCSSAREAHLKYTTFKAGPILELEQWIDKYTSQLPPLTAFILPSGGKISSALHFCRAVCRRAERRVVPLVQMGETDANVAKFLNRLSDYLFTLARYAAMKEGNQEKIYMKNDPSAESEGL

SEQ ID NO: 71 - protein, 225 aa, Artificial Sequence
  MMACHC
MFDRALKPFLQSCHLRMLTDPVDQCVAYHLGRVRESLPELQIEIIADYEVHPNRRPKILAQTAAHVAGAAYYYQRQDVEADPWGNQRISGVCIHPRFGGWFAIRGVVLLPGIEVPDLPPRKPHDCVPTRADRIALLEGFNFHWRDWTYRDAVTPQERYSEEQKAYFSTPPAQRLALLGLAQPSEKPSSPSPDLPFTTPAPKKPGNPSRARSWLSPRVSPPASPGP

SEQ ID NO: 72 - protein, 296 aa, Artificial Sequence
  MMADHC
MANVLCNRARLVSYLPGFCSLVKRVVNPKAFSTAGSSGSDESHVAAAPPDICSRTVWPDETMGPFGPQDQRFQLPGNIGFDCHLNGTASQKKSLVHKTLPDVLAEPLSSERHEFVMAQYVNEFQGNDAPVEQEINSAETYFESARVECAIQTCPELLRKDFESLFPEVANGKLMILTVTQKTKNDMTVWSEEVEIEREVLLEKFINGAKEICYALRAEGYWADFIDPSSGLAFFGPYTNNTLFETDERYRHLGFSVDDLGCCKVIRHSLWGTHVVVGSIFTNATPDSHIMKKLSGN

SEQ ID NO: 73 - protein, 176 aa, Artificial Sequence
  MCEE
MARVLKAAAANAVGLFSRLQAPIPTVRASSTSQPLDQVTGSVWNLGRLNHVAIAVPDLEKAAAFYKNILGAQVSEAVPLPEHGVSVVFVNLGNTKMELLHPLGRDSPIAGFLQKNKAGGMHHICIEVDNINAAVMDLKKKKIRSLSEEVKIGAHGKPVIFLHPKDCGGVLVELEQA

SEQ ID NO: 74 - protein, 728 aa, Artificial Sequence
  PCCA
MAGFWVGTAPLVAAGRRGRWPPQQLMLSAALRTLKHVLYYSRQCLMVSRNLGSVGYDPNEKTFDKILVANRGEIACRVIRTCKKMGIKTVAIHSDVDASSVHVKMADEAVCVGPAPTSKSYLNMDAIMEAIKKTRAQAVHPGYGFLSENKEFARCLAAEDVVFIGPDTHAIQAMGDKIESKLLAKKAEVNTIPGFDGVVKDAEEAVRIAREIGYPVMIKASAGGGGKGMRIAWDDEETRDGFRLSSQEAASSFGDDRLLIEKFIDNPRHIEIQVLGDKHGNALWLNERECSIQRRNQKVVEEAPSIFLDAETRRAMGEQAVALARAVKYSSAGTVEFLVDSKKNFYFLEMNTRLQVEHPVTECITGLDLVQEMIRVAKGYPLRHKQADIRINGWAVECRVYAEDPYKSFGLPSIGRLSQYQEPLHLPGVRVDSGIQPGSDISIYYDPMISKLITYGSDRTEALKRMADALDNYVIRGVTHNIALLREVIINSRFVKGDISTKFLSDVYPDGFKGHMLTKSEKNQLLAIASSLFVAFQLRAQHFQENSRMPVIKPDIANWELSVKLHDKVHTVVASNNGSVFSVEVDGSKLNVTSTWNLASPLLSVSVDGTQRTVQCLSREAGGNMSIQFLGTVYKVNILTRLAAELNKFMLEKVTEDTSSVLRSPMPGVVVAVSVKPGDAVAEGQEICVIEAMKMQNSMTAGKTGTVKSVHCQAGDTVGEGDLLVELE

SEQ ID NO: 75 - protein, 539 aa, Artificial Sequence
  PCCB
MAAALRVAAVGARLSVLASGLRAAVRSLCSQATSVNERIENKRRTALLGGGQRRIDAQHKRGKLTARERISLLLDPGSFVESDMFVEHRCADFGMAADKNKFPGDSVVTGRGRINGRLVYVFSQDFTVFGGSLSGAHAQKICKIMDQAITVGAPVIGLNDSGGARIQEGVESLAGYADIFLRNVTASGVIPQISLIMGPCAGGAVYSPALTDFTFMVKDTSYLFITGPDVVKSVTNEDVTQEELGGAKTHTTMSGVAHRAFENDVDALCNLRDFFNYLPLSSQDPAPVRECHDPSDRLVPELDTIVPLESTKAYNMVDIIHSVVDEREFFEIMPNYAKNIIVGFARMNGRTVGIVGNQPKVASGCLDINSSVKGARFVRFCDAFNIPLITFVDVPGFLPGTAQEYGGIIRHGAKLLYAFAEATVPKVTVITRKAYGGAYDVMSSKHLCGDTNYAWPTAEIAVMGAKGAVEIIFKGHENVEAAQAEYIEKFANPFPAAVRGFVDDIIQPSSTRARICCDLDVLASKKVQRPWRKHANIPL

SEQ ID NO: 76 - protein, 533 aa, Artificial Sequence
  UGT1A1
MAVESQGGRPLVLGLLLCVLGPVVSHAGKILLIPVDGSHWLSMLGAIQQLQQRGHEIVVLAPDASLYIRDGAFYTLKTYPVPFQREDVKESFVSLGHNVFENDSFLQRVIKTYKKIKKDSAMLLSGCSHLLHNKELMASLAESSFDVMLTDPFLPCSPIVAQYLSLPTVFFLHALPCSLEFEATQCPNPFSYVPRPLSSHSDHMTFLQRVKNMLIAFSQNFLCDVVYSPYATLASEFLQREVTVQDLLSSASVWLFRSDFVKDYPRPIMPNMVFVGGINCLHQNPLSQEFEAYINASGEHGIVVFSLGSMVSEIPEKKAMAIADALGKIPQTVLWRYTGTRPSNLANNTILVKWLPQNDLLGHPMTRAFITHAGSHGVYESICNGVPMVMMPLFGDQMDNAKRMETKGAGVTLNVLEMTSEDLENALKAVINDKSYKENIMRLSSLHKDRPVEPLDLAVFWVEFVMRHKGAPHLRPAAHDLTWYQYHSLDVIGFLLAVVLTVAFITFKCCAYGYRKCLGKKGRVKKAHKSKTH

SEQ ID NO: 77 - protein, 412 aa, Artificial Sequence
  ASS1
MSSKGSVVLAYSGGLDTSCILVWLKEQGYDVIAYLANIGQKEDFEEARKKALKLGAKKVFIEDVSREFVEEFIWPAIQSSALYEDRYLLGTSLARPCIARKQVEIAQREGAKYVSHGATGKGNDQVRFELSCYSLAPQIKVIAPWRMPEFYNRFKGRNDLMEYAKQHGIPIPVTPKNPWSMDENLMHISYEAGILENPKNQAPPGLYTKTQDPAKAPNTPDILEIEFKKGVPVKVTNVKDGTTHQTSLELFMYLNEVAGKHGVGRIDIVENRFIGMKSRGIYETPAGTILYHAHLDIEAFTMDREVRKIKQGLGLKFAELVYTGFWHSPECEFVRHCIAKSQERVEGKVQVSVLKGQVYILGRESPLSLYNEELVSMNVQGDYEPTDATGFININSLRLKEYHRLQSKVTAK

SEQ ID NO: 78 - protein, 452 aa, Artificial Sequence
  PAH
MSTAVLENPGLGRKLSDFGQETSYIEDNCNQNGAISLIFSLKEEVGALAKVLRLFEENDVNLTHIESRPSRLKKDEYEFFTHLDKRSLPALTNIIKILRHDIGATVHELSRDKKKDTVPWFPRTIQELDRFANQILSYGAELDADHPGFKDPVYRARRKQFADIAYNYRHGQPIPRVEYMEEEKKTWGTVFKTLKSLYKTHACYEYNHIFPLLEKYCGFHEDNIPQLEDVSQFLQTCTGFRLRPVAGLLSSRDFLGGLAFRVFHCTQYIRHGSKPMYTPEPDICHELLGHVPLFSDRSFAQFSQEIGLASLGAPDEYIEKLATIYWFTVEFGLCKQGDSIKAYGAGLLSSFGELQYCLSEKPKLLPLELEKTAIQNYTVTEFQPLYYVAESFNDAKEKVRNFAATIPRPFSVRYDPYTQRIEVLDNTQQLKILADSINSEIGILCSALQKIK

SEQ ID NO: 79 - protein, 568 aa, Artificial Sequence
  PAL
MAKTLSQAQSKTSSQQFSFTGNSSANVIIGNQKLTINDVARVARNGTLVSLTNNTDILQGIQASCDYINNAVESGEPIYGVTSGFGGMANVAISREQASELQTNLVWFLKTGAGNKLPLADVRAAMLLRANSHMRGASGIRLELIKRMEIFLNAGVTPYVYEFGSIGASGDLVPLSYITGSLIGLDPSFKVDFNGKEMDAPTALRQLNLSPLTLLPKEGLAMMNGTSVMTGIAANCVYDTQILTAIAMGVHALDIQALNGTNQSFHPFIHNSKPHPGQLWAADQMISLLANSQLVRDELDGKHDYRDHELIQDRYSLRCLPQYLGPIVDGISQIAKQIEIEINSVTDNPLIDVDNQASYHGGNFLGQYVGMGMDHLRYYIGLLAKHLDVQIALLASPEFSNGLPPSLLGNRERKVNMGLKGLQICGNSIMPLLTFYGNSIADRFPTHAEQFNQNINSQGYTSATLARRSVDIFQNYVAIALMFGVQAVDLRTYKKTGHYDARASLSPATERLYSAVRHVVGQKPTSDRPYIWNDNEQGLDEHIARISADIAAGGVIVQAVQDILPSLH

SEQ ID NO: 80 - protein, 1251 aa, Artificial Sequence
  ATP8B1
MSTERDSETTFDEDSQPNDEVVPYSDDETEDELDDQGSAVEPEQNRVNREAEENREPFRKECTWQVKANDRKYHEQPHFMNTKFLCIKESKYANNAIKTYKYNAFTFIPMNLFEQFKRAANLYFLALLILQAVPQISTLAWYTTLVPLLVVLGVTAIKDLVDDVARHKMDKEINNRTCEVIKDGRFKVAKWKEIQVGDVIRLKKNDFVPADILLLSSSEPNSLCYVETAELDGETNLKFKMSLEITDQYLQREDTLATFDGFIECEEPNNRLDKFTGTLFWRNTSFPLDADKILLRGCVIRNTDFCHGLVIFAGADTKIMKNSGKTRFKRTKIDYLMNYMVYTIFVVLILLSAGLAIGHAYWEAQVGNSSWYLYDGEDDTPSYRGFLIFWGYIIVLNTMVPISLYVSVEVIRLGQSHFINWDLQMYYAEKDTPAKARTTTLNEQLGQIHYIFSDKTGTLTQNIMTFKKCCINGQIYGDHRDASQHNHNKIEQVDFSWNTYADGKLAFYDHYLIEQIQSGKEPEVRQFFFLLAVCHTVMVDRTDGQLNYQAASPDEGALVNAARNFGFAFLARTQNTITISELGTERTYNVLAILDFNSDRKRMSIIVRTPEGNIKLYCKGADTVIYERLHRMNPTKQETQDALDIFANETLRTLCLCYKEIEEKEFTEWNKKFMAASVASTNRDEALDKVYEEIEKDLILLGATAIEDKLQDGVPETISKLAKADIKIWVLTGDKKETAENIGFACELLTEDTTICYGEDINSLLHARMENQRNRGGVYAKFAPPVQESFFPPGGNRALIITGSWLNEILLEKKTKRNKILKLKFPRTEEERRMRTQSKRRLEAKKEQRQKNFVDLACECSAVICCRVTPKQKAMVVDLVKRYKKAITLAIGDGANDVNMIKTAHIGVGISGQEGMQAVMSSDYSFAQFRYLQRLLLVHGRWSYIRMCKFLRYFFYKNFAFTLVHFWYSFFNGYSAQTAYEDWFITLYNVLYTSLPVLLMGLLDQDVSDKLSLRFPGLYIVGQRDLLFNYKRFFVSLLHGVLTSMILFFIPLGAYLQTVGQDGEAPSDYQSFAVTIASALVITVNFQIGLDTSYWTFVNAFSIFGSIALYFGIMFDFHSAGIHVLFPSAFQFTGTASNALRQPYIWLTIILAVAVCLLPVVAIRFLSMTIWPSESDKIQKHRKRLKAEEQWQRRQQVFRRGVSTRRSAYAFSHQRGYADLISSGRSIRKKRSPLDAIVADGTAEYRRTGDS

SEQ ID NO: 81 - protein, 1321 aa, Artificial Sequence
  ABCB11
MSDSVILRSIKKFGEENDGFESDKSYNNDKKSRLQDEKKGDGVRVGFFQLFRFSSSTDIWLMFVGSLCAFLHGIAQPGVLLIFGTMTDVFIDYDVELQELQIPGKACVNNTIVWTNSSLNQNMTNGTRCGLLNIESEMIKFASYYAGIAVAVLITGYIQICFWVIAAARQIQKMRKFYFRRIMRMEIGWFDCNSVGELNTRFSDDINKINDAIADQMALFIQRMTSTICGFLLGFFRGWKLTLVIISVSPLIGIGAATIGLSVSKFTDYELKAYAKAGVVADEVISSMRTVAAFGGEKREVERYEKNLVFAQRWGIRKGIVMGFFTGFVWCLIFLCYALAFWYGSTLVLDEGEYTPGTLVQIFLSVIVGALNLGNASPCLEAFATGRAAATSIFETIDRKPIIDCMSEDGYKLDRIKGEIEFHNVTFHYPSRPEVKILNDLNMVIKPGEMTALVGPSGAGKSTALQLIQRFYDPCEGMVTVDGHDIRSLNIQWLRDQIGIVEQEPVLFSTTIAENIRYGREDATMEDIVQAAKEANAYNFIMDLPQQFDTLVGEGGGQMSGGQKQRVAIARALIRNPKILLLDMATSALDNESEAMVQEVLSKIQHGHTIISVAHRLSTVRAADTIIGFEHGTAVERGTHEELLERKGVYFTLVTLQSQGNQALNEEDIKDATEDDMLARTFSRGSYQDSLRASIRQRSKSQLSYLVHEPPLAVVDHKSTYEEDRKDKDIPVQEEVEPAPVRRILKFSAPEWPYMLVGSVGAAVNGTVTPLYAFLFSQILGTFSIPDKEEQRSQINGVCLLFVAMGCVSLFTQFLQGYAFAKSGELLTKRLRKFGFRAMLGQDIAWFDDLRNSPGALTTRLATDASQVQGAAGSQIGMIVNSFTNVTVAMIIAFSFSWKLSLVILCFFPFLALSGATQTRMLTGFASRDKQALEMVGQITNEALSNIRTVAGIGKERRFIEALETELEKPFKTAIQKANIYGFCFAFAQCIMFIANSASYRYGGYLISNEGLHFSYVFRVISAVVLSATALGRAFSYTPSYAKAKISAARFFQLLDRQPPISVYNTAGEKWDNFQGKIDFVDCKFTYPSRPDSQVLNGLSVSISPGQTLAFVGSSGCGKSTSIQLLERFYDPDQGKVMIDGHDSKKVNVQFLRSNIGIVSQEPVLFACSIMDNIKYGDNTKEIPMERVIAAAKQAQLHDFVMSLPEKYETNVGSQGSQLSRGEKQRIAIARAIVRDPKILLLDEATSALDTESEKTVQVALDKAREGRTCIVIAHRLSTIQNADIIAVMAQGVVIEKGTHEELMAQKGAYYKLVTTGSPIS

SEQ ID NO: 82 - protein, 1286 aa, Artificial Sequence
  ABCB4
MDLEAAKNGTAWRPTSAEGDFELGISSKQKRKKTKTVKMIGVLTLFRYSDWQDKLFMSLGTIMAIAHGSGLPLMMIVFGEMTDKFVDTAGNFSFPVNFSLSLLNPGKILEEEMTRYAYYYSGLGAGVLVAAYIQVSFWTLAAGRQIRKIRQKFFHAILRQEIGWFDINDTTELNTRLTDDISKISEGIGDKVGMFFQAVATFFAGFIVGFIRGWKLTLVIMAISPILGLSAAVWAKILSAFSDKELAAYAKAGAVAEEALGAIRTVIAFGGQNKELERYQKHLENAKEIGIKKAISANISMGIAFLLIYASYALAFWYGSTLVISKEYTIGNAMTVFFSILIGAFSVGQAAPCIDAFANARGAAYVIFDIIDNNPKIDSFSERGHKPDSIKGNLEFNDVHFSYPSRANVKILKGLNLKVQSGQTVALVGSSGCGKSTTVQLIQRLYDPDEGTINIDGQDIRNFNVNYLREIIGVVSQEPVLFSTTIAENICYGRGNVTMDEIKKAVKEANAYEFIMKLPQKFDTLVGERGAQLSGGQKQRIAIARALVRNPKILLLDEATSALDTESEAEVQAALDKAREGRTTIVIAHRLSTVRNADVIAGFEDGVIVEQGSHSELMKKEGVYFKLVNMQTSGSQIQSEEFELNDEKAATRMAPNGWKSRLFRHSTQKNLKNSQMCQKSLDVETDGLEANVPPVSFLKVLKLNKTEWPYFVVGTVCAIANGGLQPAFSVIFSEIIAIFGPGDDAVKQQKCNIFSLIFLFLGIISFFTFFLQGFTFGKAGEILTRRLRSMAFKAMLRQDMSWFDDHKNSTGALSTRLATDAAQVQGATGTRLALIAQNIANLGTGIIISFIYGWQLTLLLLAVVPIIAVSGIVEMKLLAGNAKRDKKELEAAGKIATEAIENIRTVVSLTQERKFESMYVEKLYGPYRNSVQKAHIYGITFSISQAFMYFSYAGCFRFGAYLIVNGHMRFRDVILVFSAIVFGAVALGHASSFAPDYAKAKLSAAHLFMLFERQPLIDSYSEEGLKPDKFEGNITFNEVVFNYPTRANVPVLQGLSLEVKKGQTLALVGSSGCGKSTVVQLLERFYDPLAGTVFVDFGFQLLDGQEAKKLNVQWLRAQLGIVSQEPILFDCSIAENIAYGDNSRVVSQDEIVSAAKAANIHPFIETLPHKYETRVGDKGTQLSGGQKQRIAIARALIRQPQILLLDEATSALDTESEKVVQEALDKAREGRTCIVIAHRLSTIQNADLIVVFQNGRVKEHGTHQQLLAQKGIYFSMVSVQAGTQNL

SEQ ID NO: 83 - protein, 1190 aa, Artificial Sequence
  TJP2
MPVRGDRGFPPRRELSGWLRAPGMEELIWEQYTVTLQKDSKRGFGIAVSGGRDNPHFENGETSIVISDVLPGGPADGLLQENDRVVMVNGTPMEDVLHSFAVQQLRKSGKVAAIVVKRPRKVQVAALQASPPLDQDDRAFEVMDEFDGRSFRSGYSERSRLNSHGGRSRSWEDSPERGRPHERARSRERDLSRDRSRGRSLERGLDQDHARTRDRSRGRSLERGLDHDFGPSRDRDRDRSRGRSIDQDYERAYHRAYDPDYERAYSPEYRRGARHDARSRGPRSRSREHPHSRSPSPEPRGRPGPIGVLLMKSRANEEYGLRLGSQIFVKEMTRTGLATKDGNLHEGDIILKINGTVTENMSLTDARKLIEKSRGKLQLVVLRDSQQTLINIPSLNDSDSEIEDISEIESNRSFSPEERRHQYSDYDYHSSSEKLKERPSSREDTPSRLSRMGATPTPFKSTGDIAGTVVPETNKEPRYQEDPPAPQPKAAPRTFLRPSPEDEAIYGPNTKMVRFKKGDSVGLRLAGGNDVGIFVAGIQEGTSAEQEGLQEGDQILKVNTQDFRGLVREDAVLYLLEIPKGEMVTILAQSRADVYRDILACGRGDSFFIRSHFECEKETPQSLAFTRGEVFRVVDTLYDGKLGNWLAVRIGNELEKGLIPNKSRAEQMASVQNAQRDNAGDRADFWRMRGQRSGVKKNLRKSREDLTAVVSVSTKFPAYERVLLREAGFKRPVVLFGPIADIAMEKLANELPDWFQTAKTEPKDAGSEKSTGVVRLNTVRQIIEQDKHALLDVTPKAVDLLNYTQWFPIVIFFNPDSRQGVKTMRQRLNPTSNKSSRKLFDQANKLKKTCAHLFTATINLNSANDSWFGSLKDTIQHQQGEAVWVSEGKMEGMDDDPEDRMSYLTAMGADYLSCDSRLISDFEDTDGEGGAYTDNELDEPAEEPLVSSITRSSEPVQHEESIRKPSPEPRAQMRRAASSDQLRDNSPPPAFKPEPPKAKTQNKEESYDFSKSYEYKSNPSAVAGNETPGASTKGYPPPVAAKPTFGRSILKPSTPIPPQEGEEVGESSEEQDNAPKSVLGKVKIFEKMDHKARLQRMQELQEAQNARIEIAQKHPDIYAVPIKTHKPDPGTPQHTSSRPPEPQKAPSRPYQDTRGSYGSDAEEEEYRQQLSEHSKRGYYGQSARYRDTEL

SEQ ID NO: 84 - protein, 423 aa, Artificial Sequence
  IVD
MATATRLLGWRVASWRLRPPLAGFVSQRAHSLLPVDDAINGLSEEQRQLRQTMAKFLQEHLAPKAQEIDRSNEFKNLREFWKQLGNLGVLGITAPVQYGGSGLGYLEHVLVMEEISRASGAVGLSYGAHSNLCINQLVRNGNEAQKEKYLPKLISGEYIGALAMSEPNAGSDVVSMKLKAEKKGNHYILNGNKFWITNGPDADVLIVYAKTDLAAVPASRGITAFIVEKGMPGFSTSKKLDKLGMRGSNTCELIFEDCKIPAANILGHENKGVYVLMSGLDLERLVLAGGPLGLMQAVLDHTIPYLHVREAFGQKIGHFQLMQGKMADMYTRLMACRQYVYNVAKACDEGHCTAKDCAGVILYSAECATQVALDGIQCFGGNGYINDFPMGRFLRDAKLYEIGAGTSEVRRLVIGRAFNADFH

SEQ ID NO: 85 - protein, 438 aa, Artificial Sequence
  GCDH
MALRGVSVRLLSRGPGLHVLRTWVSSAAQTEKGGRTQSQLAKSSRPEFDWQDPLVLEEQLTTDEILIRDTFRTYCQERLMPRILLANRNEVFHREIISEMGELGVLGPTIKGYGCAGVSSVAYGLLARELERVDSGYRSAMSVQSSLVMHPIYAYGSEEQRQKYLPQLAKGELLGCFGLTEPNSGSDPSSMETRAHYNSSNKSYTLNGTKTWITNSPMADLFVVWARCEDGCIRGFLLEKGMRGLSAPRIQGKFSLRASATGMIIMDGVEVPEENVLPGASSLGGPFGCLNNARYGIAWGVLGASEFCLHTARQYALDRMQFGVPLARNQLIQKKLADMLTEITLGLHACLQLGRLKDQDKAAPEMVSLLKRNNCGKALDIARQARDMLGGNGISDEYHVIRHAMNLEAVNTYEGTHDIHALILGRAITGIQAFTASK

SEQ ID NO: 86 - protein, 333 aa, Artificial Sequence
  ETFA
MFRAAAPGQLRRAASLLRFQSTLVIAEHANDSLAPITLNTITAATRLGGEVSCLVAGTKCDKVAQDLCKVAGIAKVLVAQHDVYKGLLPEELTPLILATQKQFNYTHICAGASAFGKNLLPRVAAKLEVAPISDIIAIKSPDTFVRTIYAGNALCTVKCDEKVKVFSVRGTSFDAAATSGGSASSEKASSTSPVEISEWLDQKLTKSDRPELTGAKVVVSGGRGLKSGENFKLLYDLADQLHAAVGASRAAVDAGFVPNDMQVGQTGKIVAPELYIAVGISGAIQHLAGMKDSKTIVAINKDPEAPIFQVADYGIVADLFKVVPEMTEILKKK

SEQ ID NO: 87 - protein, 255 aa, Artificial Sequence
  ETFB
MAELRVLVAVKRVIDYAVKIRVKPDRTGVVTDGVKHSMNPFCEIAVEEAVRLKEKKLVKEVIAVSCGPAQCQETIRTALAMGADRGIHVEVPPAEAERLGPLQVARVLAKLAEKEKVDLVLLGKQAIDDDCNQTGQMTAGFLDWPQGTFASQVTLEGDKLKVEREIDGGLETLRLKLPAVVTADLRLNEPRYATLPNIMKAKKKKIEVIKPGDLGVDLTSKLSVISVEDPPQRTAGVKVETTEDLVAKLKEIGRI

SEQ ID NO: 88 - protein, 617 aa, Artificial Sequence
  ETFDH
MLVPLAKLSCLAYQCFHALKIKKNYLPLCATRWSSTSTVPRITTHYTIYPRDKDKRWEGVNMERFAEEADVVIVGAGPAGLSAAVRLKQLAVAHEKDIRVCLVEKAAQIGAHTLSGACLDPGAFKELFPDWKEKGAPLNTPVTEDRFGILTEKYRIPVPILPGLPMNNHGNYIVRLGHLVSWMGEQAEALGVEVYPGYAAAEVLFHDDGSVKGIATNDVGIQKDGAPKATFERGLELHAKVTIFAEGCHGHLAKQLYKKFDLRANCEPQTYGIGLKELWVIDEKNWKPGRVDHTVGWPLDRHTYGGSFLYHLNEGEPLVALGLVVGLDYQNPYLSPFREFQRWKHHPSIRPTLEGGKRIAYGARALNEGGFQSIPKLTFPGGLLIGCSPGFMNVPKIKGTHTAMKSGILAAESIFNQLTSENLQSKTIGLHVTEYEDNLKNSWVWKELYSVRNIRPSCHGVLGVYGGMIYTGIFYWILRGMEPWTLKHKGSDFERLKPAKDCTPIEYPKPDGQISFDLLSSVALSGTNHEHDQPAHLTLRDDSIPVNRNLSIYDGPEQRFCPAGVYEFVPVEQGDGFRLQINAQNCVHCKTCDIKDPSQNINWVVPEGGGGPAYNGM

SEQ ID NO: 89 - protein, 464 aa, Artificial Sequence
  ASL
MASESGKLWGGRFVGAVDPIMEKFNASIAYDRHLWEVDVQGSKAYSRGLEKAGLLTKAEMDQILHGLDKVAEEWAQGTFKLNSNDEDIHTANERRLKELIGATAGKLHTGRSRNDQVVTDLRLWMRQTCSTLSGLLWELIRTMVDRAEAERDVLFPGYTHLQRAQPIRWSHWILSHAVALTRDSERLLEVRKRINVLPLGSGAIAGNPLGVDRELLRAELNFGAITLNSMDATSERDFVAEFLFWASLCMTHLSRMAEDLILYCTKEFSFVQLSDAYSTGSSLMPQKKNPDSLELIRSKAGRVFGRCAGLLMTLKGLPSTYNKDLQEDKEAVFEVSDTMSAVLQVATGVISTLQIHQENMGQALSPDMLATDLAYYLVRKGMPFRQAHEASGKAVFMAETKGVALNQLSLQELQTISPLFSGDVICVWDYGHSVEQYGALGGTARSSVDWQIRQVRALLQAQQA

SEQ ID NO: 90 - protein, 387 aa, Artificial Sequence
  D2HGDH
MVGGSVPVFDEIILSTARMNRVLSFHSVSGILVCQAGCVLEELSRYVEERDFIMPLDLGAKGSCHIGGNVATNAGGLRFLRYGSLHGTVLGLEVVLADGTVLDCLTSLRKDNTGYDLKQLFIGSEGTLGIITTVSILCPPKPRAVNVAFLGCPGFAEVLQTFSTCKGMLGEILSAFEFMDAVCMQLVGRHLHLASPVQESPFYVLIETSGSNAGHDAEKLGHFLEHALGSGLVTDGTMATDQRKVKMLWALRERITEALSRDGYVYKYDLSLPVERLYDIVTDLRARLGPHAKHVVGYGHLGDGNLHLNVTAEAFSPSLLAALEPHVYEWTAGQQGSVSAEHGVGFRKRDVLGYSKPPGALQLMQQLKALLDPKGILNPYKTLPSQA

SEQ ID NO: 91 - protein, 325 aa, Artificial Sequence
  HMGCL
MAAMRKALPRRLVGLASLRAVSTSSMGTLPKRVKIVEVGPRDGLQNEKNIVSTPVKIKLIDMLSEAGLSVIETTSFVSPKWVPQMGDHTEVLKGIQKFPGINYPVLTPNLKGFEAAVAAGAKEVVIFGAASELFTKKNINCSIEESFQRFDAILKAAQSANISVRGYVSCALGCPYEGKISPAKVAEVTKKFYSMGCYEISLGDTIGVGTPGIMKDMLSAVMQEVPLAALAVHCHDTYGQALANTLMALQMGVSVVDSSVAGLGGCPYAQGASGNLATEDLVYMLEGLGIHTGVNLQKLLEAGNFICQALNRKTSSKVAQATCKL

SEQ ID NO: 92 - protein, 725 aa, Artificial Sequence
  MCCC1
MAAASAVSVLLVAAERNRWHRLPSLLLPPRTWVWRQRTMKYTTATGRNITKVLIANRGEIACRVMRTAKKLGVQTVAVYSEADRNSMHVDMADEAYSIGPAPSQQSYLSMEKIIQVAKTSAAQAIHPGCGFLSENMEFAELCKQEGIIFIGPPPSAIRDMGIKSTSKSIMAAAGVPVVEGYHGEDQSDQCLKEHARRIGYPVMIKAVRGGGGKGMRIVRSEQEFQEQLESARREAKKSFNDDAMLIEKFVDTPRHVEVQVFGDHHGNAVYLFERDCSVQRRHQKIIEEAPAPGIKSEVRKKLGEAAVRAAKAVNYVGAGTVEFIMDSKHNFCFMEMNTRLQVEHPVTEMITGTDLVEWQLRIAAGEKIPLSQEEITLQGHAFEARIYAEDPSNNFMPVAGPLVHLSTPRADPSTRIETGVRQGDEVSVHYDPMIAKLVVWAADRQAALTKLRYSLRQYNIVGLHTNIDFLLNLSGHPEFEAGNVHTDFIPQHHKQLLLSRKAAAKESLCQAALGLILKEKAMTDTFTLQAHDQFSPFSSSSGRRLNISYTRNMTLKDGKNNVAIAVTYNHDGSYSMQIEDKTFQVLGNLYSEGDCTYLKCSVNGVASKAKLIILENTIYLFSKEGSIEIDIPVPKYLSSVSSQETQGGPLAPMTGTIEKVFVKAGDKVKAGDSLMVMIAMKMEHTIKSPKDGTVKKVFYREGAQANRHTPLVEFEEEESDKRESE

SEQ ID NO: 93 - protein, 563 aa, Artificial Sequence
  MCCC2
MWAVLRLALRPCARASPAGPRAYHGDSVASLGTQPDLGSALYQENYKQMKALVNQLHERVEHIKLGGGEKARALHISRGKLLPRERIDNLIDPGSPFLELSQFAGYQLYDNEEVPGGGIITGIGRVSGVECMIIANDATVKGGAYYPVTVKKQLRAQEIAMQNRLPCIYLVDSGGAYLPRQADVFPDRDHFGRTFYNQAIMSSKNIAQIAVVMGSCTAGGAYVPAMADENIIVRKQGTIFLAGPPLVKAATGEEVSAEDLGGADLHCRKSGVSDHWALDDHHALHLTRKVVRNLNYQKKLDVTIEPSEEPLFPADELYGIVGANLKRSFDVREVIARIVDGSRFTEFKAFYGDTLVTGFARIFGYPVGIVGNNGVLFSESAKKGTHFVQLCCQRNIPLLFLQNITGFMVGREYEAEGIAKDGAKMVAAVACAQVPKITLIIGGSYGAGNYGMCGRAYSPRFLYIWPNARISVMGGEQAANVLATITKDQRAREGKQFSSADEAALKEPIIKKFEEEGNPYYSSARVWDDGIIDPADTRLVLGLSFSAALNAPIEKTDFGIFRM

SEQ ID NO: 94 - protein, 606 aa, Artificial Sequence
  ABCD4
MAVAGPAPGAGARPRLDLQFLQRFLQILKVLFPSWSSQNALMFLTLLCLTLLEQFVIYQVGLIPSQYYGVLGNKDLEGFKTLTFLAVMLIVLNSTLKSFDQFTCNLLYVSWRKDLTEHLHRLYFRGRAYYTLNVLRDDIDNPDQRISQDVERFCRQLSSMASKLIISPFTLVYYTYQCFQSTGWLGPVSIFGYFILGTVVNKTLMGPIVMKLVHQEKLEGDFRFKHMQIRVNAEPAAFYRAGHVEHMRTDRRLQRLLQTQRELMSKELWLYIGINTFDYLGSILSYVVIAIPIFSGVYGDLSPAELSTLVSKNAFVCIYLISCFTQLIDLSTTLSDVAGYTHRIGQLRETLLDMSLKSQDCEILGESEWGLDTPPGWPAAEPADTAFLLERVSISAPSSDKPLIKDLSLKISEGQSLLITGNTGTGKTSLLRVLGGLWTSTRGSVQMLTDFGPHGVLFLPQKPFFTDGTLREQVIYPLKEVYPDSGSADDERILRFLELAGLSNLVARTEGLDQQVDWNWYDVLSPGEMQRLSFARLFYLQPKYAVLDEATSALTEEVESELYRIGQQLGMTFISVGHRQSLEKFHSLVLKLCGGGRWELMRIKVE

SEQ ID NO: 95 - protein, 2035 aa, Artificial Sequence
  HCFC1
MASAVSPANLPAVLLQPRWKRVVGWSGPVPRPRHGHRAVAIKELIVVFGGGNEGIVDELHVYNTATNQWFIPAVRGDIPPGCAAYGFVCDGTRLLVFGGMVEYGKYSNDLYELQASRWEWKRLKAKTPKNGPPPCPRLGHSFSLVGNKCYLFGGLANDSEDPKNNIPRYLNDLYILELRPGSGVVAWDIPITYGVLPPPRESHTAVVYTEKDNKKSKLVIYGGMSGCRLGDLWTLDIDTLTWNKPSLSGVAPLPRSLHSATTIGNKMYVFGGWVPLVMDDVKVATHEKEWKCTNTLACLNLDTMAWETILMDTLEDNIPRARAGHCAVAINTRLYIWSGRDGYRKAWNNQVCCKDLWYLETEKPPPPARVQLVRANTNSLEVSWGAVATADSYLLQLQKYDIPATAATATSPTPNPVPSVPANPPKSPAPAAAAPAVQPLTQVGITLLPQAAPAPPTTTTIQVLPTVPGSSISVPTAARTQGVPAVLKVTGPQATTGTPLVTMRPASQAGKAPVTVTSLPAGVRMVVPTQSAQGTVIGSSPQMSGMAALAAAAAATQKIPPSSAPTVLSVPAGTTIVKTMAVTPGTTTLPATVKVASSPVMVSNPATRMLKTAAAQVGTSVSSATNTSTRPIITVHKSGTVTVAQQAQVVTTVVGGVTKTITLVKSPISVPGGSALISNLGKVMSVVQTKPVQTSAVTGQASTGPVTQIIQTKGPLPAGTILKLVTSADGKPTTIITTTQASGAGTKPTILGISSVSPSTTKPGTTTIIKTIPMSAIITQAGATGVTSSPGIKSPITIITTKVMTSGTGAPAKIITAVPKIATGHGQQGVTQVVLKGAPGQPGTILRTVPMGGVRLVTPVTVSAVKPAVTTLVVKGTTGVTTLGTVTGTVSTSLAGAGGHSTSASLATPITTLGTIATLSSQVINPTAITVSAAQTTLTAAGGLTTPTITMQPVSQPTQVTLITAPSGVEAQPVHDLPVSILASPTTEQPTATVTIADSGQGDVQPGTVTLVCSNPPCETHETGTTNTATTTVVANLGGHPQPTQVQFVCDRQEAAASLVTSTVGQQNGSVVRVCSNPPCETHETGTTNTATTATSNMAGQHGCSNPPCETHETGTTNTATTAMSSVGANHQRDARRACAAGTPAVIRISVATGALEAAQGSKSQCQTRQTSATSTTMTVMATGAPCSAGPLLGPSMAREPGGRSPAFVQLAPLSSKVRLSSPSIKDLPAGRHSHAVSTAAMTRSSVGAGEPRMAPVCESLQGGSPSTTVTVTALEALLCPSATVTQVCSNPPCETHETGTTNTATTSNAGSAQRVCSNPPCETHETGTTHTATTATSNGGTGQPEGGQQPPAGRPCETHQTTSTGTTMSVSVGALLPDATSSHRTVESGLEVAAAPSVTPQAGTALLAPFPTQRVCSNPPCETHETGTTHTATTVTSNMSSNQDPPPAASDQGEVESTQGDSVNITSSSAITTTVSSTLTRAVTTVTQSTPVPGPSVPPPEELQVSPGPRQQLPPRQLLQSASTALMGESAEVLSASQTPELPAAVDLSSTGEPSSGQESAGSAVVATVVVQPPPPTQSEVDQLSLPQELMAEAQAGTTTLMVTGLTPEELAVTAAAEAAAQAAATEEAQALAIQAVLQAAQQAVMGTGEPMDTSEAAATVTQAELGHLSAEGQEGQATTIPIVLTQQELAALVQQQQLQEAQAQQQHHHLPTEALAPADSLNDPAIESNCLNELAGTVPSTVALLPSTATESLAPSNTFVAPQPVVVASPAKLQAAATLTEVANGIESLGVKPDLPPPPSKAPMKKENQWFDVGVIKGTNVMVTHYFLPPDDAVPSDDDLGTVPDYNQLKKQELQPGTAYKFRVAGINACGRGPFSEISAFKTCLPGFPGAPCAIKISKSPDGAHLTWEPPSVTSGKIIEYSVYLAIQSSQAGGELKSSTPAQLAFMRVYCGPSPSCLVQSSSLSNAHIDYTTKPAIIFRIAARNEKGYGPATQVRWLQETSKDSSGTKPANKRPMSSPEMKSAPKKSKADGQ

SEQ ID NO: 96 - protein, 540 aa, Artificial Sequence
  LMBRD1
MATSGAASAELVIGWCIFGLLLLAILAFCWIYVRKYQSRRESEVVSTITAIFSLAIALITSALLPVDIFLVSYMKNQNGTFKDWANANVSRQIEDTVLYGYYTLYSVILFCVFFWIPFVYFYYEEKDDDDTSKCTQIKTALKYTLGFVVICALLLLVGAFVPLNVPNNKNSTEWEKVKSLFEELGSSHGLAALSFSISSLTLIGMLAAITYTAYGMSALPLNLIKGTRSAAYERLENTEDIEEVEQHIQTIKSKSKDGRPLPARDKRALKQFEERLRTLKKRERHLEFIENSWWTKFCGALRPLKIVWGIFFILVALLFVISLFLSNLDKALHSAGIDSGFIIFGANLSNPLNMLLPLLQTVFPLDYILITIIIMYFIFTSMAGIRNIGIWFFWIRLYKIRRGRTRPQALLFLCMILLLIVLHTSYMIYSLAPQYVMYGSQNYLIETNITSDNHKGNSTLSVPKRCDADAPEDQCTVTRTYLFLHKFWFFSAAYYFGNWAFLGVFLIGLIVSCCKGKKSVIEGVDEDSDISDDEPSVYSA

SEQ ID NO: 97 - protein, 322 aa, Artificial Sequence
  ARG1
MSAKSRTIGIIGAPFSKGQPRGGVEEGPTVLRKAGLLEKLKEQECDVKDYGDLPFADIPNDSPFQIVKNPRSVGKASEQLAGKVAEVKKNGRISLVLGGDHSLAIGSISGHARVHPDLGVIWVDAHTDINTPLTTTSGNLHGQPVSFLLKELKGKIPDVPGFSWVTPCISAKDIVYIGLRDVDPGEHYILKTLGIKYFSMTEVDRLGIGKVMEETLSYLLGRKKRPIHLSFDVDGLDPSFTPATGTPVVGGLTYREGLYITEEIYKTGLLSGLDIMEVNPSLGKTPEEVTRTVNTAVAITLACFGLAREGNHKPIDYLNPPK

SEQ ID NO: 98 - protein, 301 aa, Artificial Sequence
  SLC25A15
MKSNPAIQAAIDLTAGAAGGTACVLTGQPFDTMKVKMQTFPDLYRGLTDCCLKTYSQVGFRGFYKGTSPALIANIAENSVLFMCYGFCQQVVRKVAGLDKQAKLSDLQNAAAGSFASAFAALVLCPTELVKCRLQTMYEMETSGKIAKSQNTVWSVIKSILRKDGPLGFYHGLSSTLLREVPGYFFFFGGYELSRSFFASGRSKDELGPVPLMLSGGVGGICLWLAVYPVDCIKSRIQVLSMSGKQAGFIRTFINVVKNEGITALYSGLKPTMIRAFPANGALFLAYEYSRKLMMNQLEAY

SEQ ID NO: 99 - protein, 675 aa, Artificial Sequence
  SLC25A13
MAAAKVALTKRADPAELRTIFLKYASIEKNGEFFMSPNDFVTRYLNIFGESQPNPKTVELLSGVVDQTKDGLISFQEFVAFESVLCAPDALFMVAFQLFDKAGKGEVTFEDVKQVFGQTTIHQHIPFNWDSEFVQLHFGKERKRHLTYAEFTQFLLEIQLEHAKQAFVQRDNARTGRVTAIDFRDIMVTIRPHVLTPFVEECLVAAAGGTTSHQVSFSYFNGFNSLLNNMELIRKIYSTLAGTRKDVEVTKEEFVLAAQKFGQVTPMEVDILFQLADLYEPRGRMTLADIERIAPLEEGTLPFNLAEAQRQKASGDSARPVLLQVAESAYRFGLGSVAGAVGATAVYPIDLVKTRMQNQRSTGSFVGELMYKNSFDCFKKVLRYEGFFGLYRGLLPQLLGVAPEKAIKLTVNDFVRDKFMHKDGSVPLAAEILAGGCAGGSQVIFTNPLEIVKIRLQVAGEITTGPRVSALSVVRDLGFFGIYKGAKACFLRDIPFSAIYFPCYAHVKASFANEDGQVSPGSLLLAGAIAGMPAASLVTPADVIKTRLQVAARAGQTTYSGVIDCFRKILREEGPKALWKGAGARVFRSSPQFGVTLLTYELLQRWFYIDFGGVKPMGSEPVPKSRINLPAPNPDHVGGYKLAVATFAGIENKFGLYLPLFKPSVSTSKAIGGGP

SEQ ID NO: 100 - protein, 330 aa, Artificial Sequence
  ALAD
MQPQSVLHSGYFHPLLRAWQTATTTLNASNLIYPIFVTDVPDDIQPITSLPGVARYGVKRLEEMLRPLVEEGLRCVLIFGVPSRVPKDERGSAADSEESPAIEAIHLLRKTFPNLLVACDVCLCPYTSHGHCGLLSENGAFRAEESRQRLAEVALAYAKAGCQVVAPSDMMDGRVEAIKEALMAHGLGNRVSVMSYSAKFASCFYGPFRDAAKSSPAFGDRRCYQLPPGARGLALRAVDRDVREGADMLMVKPGMPYLDIVREVKDKHPDLPLAVYHVSGEFAMLWHGAQAGAFDLKAAVLEAMTAFRRAGADIIITYYTPQLLQWLKEE

SEQ ID NO: 101 - protein, 454 aa, Artificial Sequence
  CPOX
MALQLGRLSSGPCWLVARGGCGGPRAWSQCGGGGLRAWSQRSAAGRVCRPPGPAGTEQSRGLGHGSTSRGGPWVGTGLAAALAGLVGLATAAFGHVQRAEMLPKTSGTRATSLGRPEEEEDELAHRCSSFMAPPVTDLGELRRRPGDMKTKMELLILETQAQVCQALAQVDGGANFSVDRWERKEGGGGISCVLQDGCVFEKAGVSISVVHGNLSEEAAKQMRSRGKVLKTKDGKLPFCAMGVSSVIHPKNPHAPTIHFNYRYFEVEEADGNKQWWFGGGCDLTPTYLNQEDAVHFHRTLKEACDQHGPDLYPKFKKWCDDYFFIAHRGERRGIGGIFFDDLDSPSKEEVFRFVQSCARAVVPSYIPLVKKHCDDSFTPQEKLWQQLRRGRYVEFNLLYDRGTKFGLFTPGSRIESILMSLPLTARWEYMHSPSENSKEAEILEVLRHPRDWVR

SEQ ID NO: 102 - protein, 361 aa, Artificial Sequence [sequence omitted]

SEQ ID NO: 103 - protein, 477 aa, Artificial Sequence
  PPOX
MGRTVVVLGGGISGLAASYHLSRAPCPPKVVLVESSERLGGWIRSVRGPNGAIFELGPRGIRPAGALGARTLLLVSELGLDSEVLPVRGDHPAAQNRFLYVGGALHALPTGLRGLLRPSPPFSKPLFWAGLRELTKPRGKEPDETVHSFAQRRLGPEVASLAMDSLCRGVFAGNSRELSIRSCFPSLFQAEQTHRSILLGLLLGAGRTPQPDSALIRQALAERWSQWSLRGGLEMLPQALETHLTSRGVSVLRGQPVCGLSLQAEGRWKVSLRDSSLEADHVISAIPASVLSELLPAEAAPLARALSAITAVSVAVVNLQYQGAHLPVQGFGHLVPSSEDPGVLGIVYDSVAFPEQDGSPPGLRVTVMLGGSWLQTLEASGCVLSQELFQQRAQEAAATQLGLKEMPSHCLVHLHKNCIPQYTLGHWQKLESARQFLTAHRLPLTLAGASYEGVAVNDCIESGRQAAVSVLGTEPNS

SEQ ID NO: 104 - protein, 543 aa, Artificial Sequence
  BTD
MAHAHIQGGRRAKSRFVVCIMSGARSKLALFLCGCYVVALGAHTGEESVADHHEAEYYVAAVYEHPSILSLNPLALISRQEALELMNQNLDIYEQQVMTAAQKDVQIIVFPEDGIHGFNFTRTSIYPFLDFMPSPQVVRWNPCLEPHRFNDTEVLQRLSCMAIRGDMFLVANLGTKEPCHSSDPRCPKDGRYQFNTNVVFSNNGTLVDRYRKHNLYFEAAFDVPLKVDLITFDTPFAGRFGIFTCFDILFFDPAIRVLRDYKVKHVVYPTAWMNQLPLLAAIEIQKAFAVAFGINVLAANVHHPVLGMTGSGIHTPLESFWYHDMENPKSHLIIAQVAKNPVGLIGAENATGETDPSHSKFLKILSGDPYCEKDAQEVHCDEATKWNVNAPPTFHSEMMYDNFTLVPVWGKEGYLHVCSNGLCCYLLYERPTLSKELYALGVFDGLHTVHGTYYIQVCALVRCGGLGFDTCGQEITEATGIFEFHLWGNFSTSYIFPLFLTSGMTLEVPDQLGWENDHYFLRKSRLSSGLVTAALYGRLYERD

SEQ ID NO: 105 - protein, 726 aa, Artificial Sequence
  HLCS
MEDRLHMDNGLVPQKIVSVHLQDSTLKEVKDQVSNKQAQILEPKPEPSLEIKPEQDGMEHVGRDDPKALGEEPKQRRGSASGSEPAGDSDRGGGPVEHYHLHLSSCHECLELENSTIESVKFASAENIPDLPYDYSSSLESVADETSPEREGRRVNLTGKAPNILLYVGSDSQEALGRFHEVRSVLADCVDIDSYILYHLLEDSALRDPWTDNCLLLVIATRESIPEDLYQKFMAYLSQGGKVLGLSSSFTFGGFQVTSKGALHKTVQNLVFSKADQSEVKLSVLSSGCRYQEGPVRLSPGRLQGHLENEDKDRMIVHVPFGTRGGEAVLCQVHLELPPSSNIVQTPEDFNLLKSSNFRRYEVLREILTTLGLSCDMKQVPALTPLYLLSAAEEIRDPLMQWLGKHVDSEGEIKSGQLSLRFVSSYVSEVEITPSCIPVVTNMEAFSSEHFNLEIYRQNLQTKQLGKVILFAEVTPTTMRLLDGLMFQTPQEMGLIVIAARQTEGKGRGGNVWLSPVGCALSTLLISIPLRSQLGQRIPFVQHLMSVAVVEAVRSIPEYQDINLRVKWPNDIYYSDLMKIGGVLVNSTLMGETFYILIGCGFNVTNSNPTICINDLITEYNKQHKAELKPLRADYLIARVVTVLEKLIKEFQDKGPNSVLPLYYRYWVHSGQQVHLGSAEGPKVSIVGLDDSGFLQVHQEGGEVVTVHPDGNSFDMLRNLILPKRR

SEQ ID NO: 106 - protein, 1178 aa, Artificial Sequence
  PC
MLKFRTVHGGLRLLGIRRTSTAPAASPNVRRLEYKPIKKVMVANRGEIAIRVFRACTELGIRTVAIYSEQDTGQMHRQKADEAYLIGRGLAPVQAYLHIPDIIKVAKENNVDAVHPGYGFLSERADFAQACQDAGVRFIGPSPEVVRKMGDKVEARAIAIAAGVPVVPGTDAPITSLHEAHEFSNTYGFPIIFKAAYGGGGRGMRVVHSYEELEENYTRAYSEALAAFGNGALFVEKFIEKPRHIEVQILGDQYGNILHLYERDCSIQRRHQKVVEIAPAAHLDPQLRTRLTSDSVKLAKQVGYENAGTVEFLVDRHGKHYFIEVNSRLQVEHTVTEEITDVDLVHAQIHVAEGRSLPDLGLRQENIRINGCAIQCRVTTEDPARSFQPDTGRIEVFRSGEGMGIRLDNASAFQGAVISPHYDSLLVKVIAHGKDHPTAATKMSRALAEFRVRGVKTNIAFLQNVLNNQQFLAGTVDTQFIDENPELFQLRPAQNRAQKLLHYLGHVMVNGPTTPIPVKASPSPTDPVVPAVPIGPPPAGFRDILLREGPEGFARAVRNHPGLLLMDTTFRDAHQSLLATRVRTHDLKKIAPYVAHNFSKLFSMENWGGATFDVAMRFLYECPWRRLQELRELIPNIPFQMLLRGANAVGYTNYPDNVVFKFCEVAKENGMDVFRVFDSLNYLPNMLLGMEAAGSAGGVVEAAISYTGDVADPSRTKYSLQYYMGLAEELVRAGTHILCIKDMAGLLKPTACTMLVSSLRDRFPDLPLHIHTHDTSGAGVAAMLACAQAGADVVDVAADSMSGMTSQPSMGALVACTRGTPLDTEVPMERVFDYSEYWEGARGLYAAFDCTATMKSGNSDVYENEIPGGQYTNLHFQAHSMGLGSKFKEVKKAYVEANQMLGDLIKVTPSSKIVGDLAQFMVQNGLSRAEAEAQAEELSFPRSVVEFLQGYIGVPHGGFPEPFRSKVLKDLPRVEGRPGASLPPLDLQALEKELVDRHGEEVTPEDVLSAAMYPDVFAHFKDFTATFGPLDSLNTRLFLQGPKIAEEFEVELERGKTLHIKALAVSDLNRAGQRQVFFELNGQLRSILVKDTQAMKEMHFHPKALKDVKGQIGAPMPGKVIDIKVVAGAKVAKGQPLCVLSAMKMETVVTSPMEGTVRKVHVTKDMTLEGDDLILEIE

SEQ ID NO: 107 - protein, 511 aa, Artificial Sequence
  SLC7A7
MVDSTEYEVASQPEVETSPLGDGASPGPEQVKLKKEISLLNGVCLIVGNMIGSGIFVSPKGVLIYSASFGLSLVIWAVGGLFSVFGALCYAELGTTIKKSGASYAYILEAFGGFLAFIRLWTSLLIIEPTSQAIIAITFANYMVQPLFPSCFAPYAASRLLAAACICLLTFINCAYVKWGTLVQDIFTYAKVLALIAVIVAGIVRLGQGASTHFENSFEGSSFAVGDIALALYSALFSYSGWDTLNYVTEEIKNPERNLPLSIGISMPIVTIIYILTNVAYYTVLDMRDILASDAVAVTFADQIFGIFNWIIPLSVALSCFGGLNASIVAASRLFFVGSREGHLPDAICMIHVERFTPVPSLLFNGIMALIYLCVEDIFQLINYYSFSYWFFVGLSIVGQLYLRWKEPDRPRPLKLSVFFPIVFCLCTIFLVAVPLYSDTINSLIGIAIALSGLPFYFLIIRVPEHKRPLYLRRIVGSATRYLQVLCMSVAAEMDLEDGGEMPKQRDPKSN

SEQ ID NO: 108 - protein, 658 aa, Artificial Sequence
  CPT2
MVPRLLLRAWPRGPAVGPGAPSRPLSAGSGPGQYLQRSIVPTMHYQDSLPRLPIPKLEDTIRRYLSAQKPLLNDGQFRKTEQFCKSFENGIGKELHEQLVALDKQNKHTSYISGPWFDMYLSARDSVVLNFNPFMAFNPDPKSEYNDQLTRATNMTVSAIRFLKTLRAGLLEPEVFHLNPAKSDTITFKRLIRFVPSSLSWYGAYLVNAYPLDMSQYFRLFNSTRLPKPSRDELFTDDKARHLLVLRKGNFYIFDVLDQDGNIVSPSEIQAHLKYILSDSSPAPEFPLAYLTSENRDIWAELRQKLMSSGNEESLRKVDSAVFCLCLDDFPIKDLVHLSHNMLHGDGTNRWFDKSFNLIIAKDGSTAVHFEHSWGDGVAVLRFFNEVFKDSTQTPAVTPQSQPATTDSTVTVQKLNFELTDALKTGITAAKEKFDATMKTLTIDCVQFQRGGKEFLKKQKLSPDAVAQLAFQMAFLRQYGQTVATYESCSTAAFKHGRTETIRPASVYTKRCSEAFVREPSRHSAGELQQMMVECSKYHGQLTKEAAMGQGFDRHLFALRHLAAAKGIILPELYLDPAYGQINHNVLSTSTLSSPAVNLGGFAPVVSDGFGVGYAVHDNWIGCNVSSYPGRNAREFLQCVEKALEDMFDALEGKSIKS

SEQ ID NO: 109 - protein, 421 aa, Artificial Sequence
  ACADM
MAAGFGRCCRVLRSISRFHWRSQHTKANRQREPGLGFSFEFTEQQKEFQATARKFAREEIIPVAAEYDKTGEYPVPLIRRAWELGLMNTHIPENCGGLGLGTFDACLISEELAYGCTGVQTAIEGNSLGQMPIIIAGNDQQKKKYLGRMTEEPLMCAYCVTEPGAGSDVAGIKTKAEKKGDEYIINGQKMWITNGGKANWYFLLARSDPDPKAPANKAFTGFIVEADTPGIQIGRKELNMGQRCSDTRGIVFEDVKVPKENVLIGDGAGFKVAMGAFDKTRPVVAAGAVGLAQRALDEATKYALERKTFGKLLVEHQAISFMLAEMAMKVELARMSYQRAAWEVDSGRRNTYYASIAKAFAGDIANQLATDAVQILGGNGFNTEYPVEKLMRDAKIYQIYEGTSQIQRLIVAREHIDKYKN

SEQ ID NO: 110 - protein, 412 aa, Artificial Sequence
  ACADS
MAAALLARASGPARRALCPRAWRQLHTIYQSVELPETHQMLLQTCRDFAEKELFPIAAQVDKEHLFPAAQVKKMGGLGLLAMDVPEELGGAGLDYLAYAIAMEEISRGCASTGVIMSVNNSLYLGPILKFGSKEQKQAWVTPFTSGDKIGCFALSEPGNGSDAGAASTTARAEGDSWVLNGTKAWITNAWEASAAVVFASTDRALQNKGISAFLVPMPTPGLTLGKKEDKLGIRGSSTANLIFEDCRIPKDSILGEPGMGFKIAMQTLDMGRIGIASQALGIAQTALDCAVNYAENRMAFGAPLTKLQVIQFKLADMALALESARLLTWRAAMLKDNKKPFIKEAAMAKLAASEAATAISHQAIQILGGMGYVTEMPAERHYRDARITEIYEGTSEIQRLVIAGHLLRSYRS

SEQ ID NO: 111 - protein, 655 aa, Artificial Sequence
  ACADVL
MQAARMAASLGRQLLRLGGGSSRLTALLGQPRPGPARRPYAGGAAQLALDKSDSHPSDALTRKKPAKAESKSFAVGMFKGQLTTDQVFPYPSVLNEEQTQFLKELVEPVSRFFEEVNDPAKNDALEMVEETTWQGLKELGAFGLQVPSELGGVGLCNTQYARLVEIVGMHDLGVGITLGAHQSIGFKGILLFGTKAQKEKYLPKLASGETVAAFCLTEPSSGSDAASIRTSAVPSPCGKYYTLNGSKLWISNGGLADIFTVFAKTPVTDPATGAVKEKITAFVVERGFGGITHGPPEKKMGIKASNTAEVFFDGVRVPSENVLGEVGSGFKVAMHILNNGRFGMAAALAGTMRGIIAKAVDHATNRTQFGEKIHNFGLIQEKLARMVMLQYVTESMAYMVSANMDQGATDFQIEAAISKIFGSEAAWKVTDECIQIMGGMGFMKEPGVERVLRDLRIFRIFEGTNDILRLFVALQGCMDKGKELSGLGSALKNPFGNAGLLLGEAGKQLRRRAGLGSGLSLSGLVHPELSRSGELAVRALEQFATVVEAKLIKHKKGIVNEQFLLQRLADGAIDLYAMVVVLSRASRSLSEGHPTAQHEKMLCDTWCIEAAARIREGMAALQSDPWQQELYRNFKSISKALVERGGVVTSNPLGF

SEQ ID NO: 112 - protein, 1532 aa, Artificial Sequence
  AGL
MGHSKQIRILLLNEMEKLEKTLFRLEQGYELQFRLGPTLQGKAVTVYTNYPFPGETFNREKFRSLDWENPTEREDDSDKYCKLNLQQSGSFQYYFLQGNEKSGGGYIVVDPILRVGADNHVLPLDCVTLQTFLAKCLGPFDEWESRLRVAKESGYNMIHFTPLQTLGLSRSCYSLANQLELNPDFSRPNRKYTWNDVGQLVEKLKKEWNVICITDVVYNHTAANSKWIQEHPECAYNLVNSPHLKPAWVLDRALWRFSCDVAEGKYKEKGIPALIENDHHMNSIRKIIWEDIFPKLKLWEFFQVDVNKAVEQFRRLLTQENRRVTKSDPNQHLTIIQDPEYRRFGCTVDMNIALTTFIPHDKGPAAIEECCNWFHKRMEELNSEKHRLINYHQEQAVNCLLGNVFYERLAGHGPKLGPVTRKHPLVTRYFTFPFEEIDFSMEESMIHLPNKACFLMAHNGWVMGDDPLRNFAEPGSEVYLRRELICWGDSVKLRYGNKPEDCPYLWAHMKKYTEITATYFQGVRLDNCHSTPLHVAEYMLDAARNLQPNLYVVAELFTGSEDLDNVFVTRLGISSLIREAMSAYNSHEEGRLVYRYGGEPVGSFVQPCLRPLMPAIAHALFMDITHDNECPIVHRSAYDALPSTTIVSMACCASGSTRGYDELVPHQISVVSEERFYTKWNPEALPSNTGEVNFQSGIIAARCAISKLHQELGAKGFIQVYVDQVDEDIVAVTRHSPSIHQSVVAVSRTAFRNPKTSFYSKEVPQMCIPGKIEEVVLEARTIERNTKPYRKDENSINGTPDITVEIREHIQLNESKIVKQAGVATKGPNEYIQEIEFENLSPGSVIIFRVSLDPHAQVAVGILRNHLTQFSPHFKSGSLAVDNADPILKIPFASLASRLTLAELNQILYRCESEEKEDGGGCYDIPNWSALKYAGLQGLMSVLAEIRPKNDLGHPFCNNLRSGDWMIDYVSNRLISRSGTIAEVGKWLQAMFFYLKQIPRYLIPCYFDAILIGAYTTLLDTAWKQMSSFVQNGSTFVKHLSLGSVQLCGVGKFPSLPILSPALMDVPYRLNEITKEKEQCCVSLAAGLPHFSSGIFRCWGRDTFIALRGILLITGRYVEARNIILAFAGTLRHGLIPNLLGEGIYARYNCRDAVWWWLQCIQDYCKMVPNGLDILKCPVSRMYPTDDSAPLPAGTLDQPLFEVIQEAMQKHMQGIQFRERNAGPQIDRNMKDEGFNITAGVDEETGFVYGGNRFNCGTWMDKMGESDRARNRGIPATPRDGSAVEIVGLSKSAVRWLLELSKKNIFPYHEVTVKRHGKAIKVSYDEWNRKIQDNFEKLFHVSEDPSDLNEKHPNLVHKRGIYKDSYGASSPWCDYQLRPNFTIAMVVAPELFTTEKAWKALEIAEKKLLGPLGMKTLDPDDMVYCGIYDNALDNDNYNLAKGFNYHQGPEWLWPIGYFLRAKLYFSRLMGPETTAKTIVLVKNVLSRHYVHLERSPWKGLPELTNENAQYCPFSCETQAWSIATILETLYDL

SEQ ID NO: 113 - protein, 357 aa, Artificial Sequence
  G6PC
MEEGMNVLHDFGIQSTHYLQVNYQDSQDWFILVSVIADLRNAFYVLFPIWFHLQEAVGIKLLWVAVIGDWLNLVFKWILFGQRPYWWVLDTDYYSNTSVPLIKQFPVTCETGPGSPSGHAMGTAGVYYVMVTSTLSIFQGKIKPTYRFRCLNVILWLGFWAVQLNVCLSRIYLAAHFPHQVVAGVLSGIAVAETFSHIHSIYNASLKKYFLITFFLFSFAIGFYLLLKGLGVDLLWTLEKAQRWCEQPEWVHIDTTPFASLLKNLGTLFGLGLALNSSMYRESCKGKLSKWLPFRLSSIVASLVLLHVFDSLKPPSQVELVFYVLSFCKSAVVPLASVSVIPYCLAQVLGQPHKKSL

SEQ ID NO: 114 - protein, 702 aa, Artificial Sequence
  GBE1
MAAPMTPAARPEDYEAALNAALADVPELARLLEIDPYLKPYAVDFQRRYKQFSQILKNIGENEGGIDKFSRGYESFGVHRCADGGLYCKEWAPGAEGVFLTGDFNGWNPFSYPYKKLDYGKWELYIPPKQNKSVLVPHGSKLKVVITSKSGEILYRISPWAKYVVREGDNVNYDWIHWDPEHSYEFKHSRPKKPRSLRIYESHVGISSHEGKVASYKHFTCNVLPRIKGLGYNCIQLMAIMEHAYYASFGYQITSFFAASSRYGTPEELQELVDTAHSMGIIVLLDVVHSHASKNSADGLNMFDGTDSCYFHSGPRGTHDLWDSRLFAYSSWEILRFLLSNIRWWLEEYRFDGFRFDGVTSMLYHHHGVGQGFSGDYSEYFGLQVDEDALTYLMLANHLVHTLCPDSITIAEDVSGMPALCSPISQGGGGFDYRLAMAIPDKWIQLLKEFKDEDWNMGDIVYTLTNRRYLEKCIAYAESHDQALVGDKSLAFWLMDAEMYTNMSVLTPFTPVIDRGIQLHKMIRLITHGLGGEGYLNFMGNEFGHPEWLDFPRKGNNESYHYARRQFHLTDDDLLRYKFLNNFDRDMNRLEERYGWLAAPQAYVSEKHEGNKIIAFERAGLLFIFNFHPSKSYTDYRVGTALPGKFKIVLDSDAAEYGGHQRLDHSTDFFSEAFEHNGRPYSLLVYIPSRVALILQNVDLPN

SEQ ID NO: 115 - protein, 1223 aa, Artificial Sequence
  PHKA1
MRSRSNSGVRLDGYARLVQQTILCHQNPVTGLLPASYDQKDAWVRDNVYSILAVWGLGLAYRKNADRDEDKAKAYELEQSVVKLMRGLLHCMIRQVDKVESFKYSQSTKDSLHAKYNTKTCATVVGDDQWGHLQLDATSVYLLFLAQMTASGLHIIHSLDEVNFIQNLVFYIEAAYKTADFGIWERGDKTNQGISELNASSVGMAKAALEALDELDLFGVKGGPQSVIHVLADEVQHCQSILNSLLPRASTSKEVDASLLSVVSFPAFAVEDSQLVELTKQEIITKLQGRYGCCRFLRDGYKTPKEDPNRLYYEPAELKLFENIECEWPLFWTYFILDGVFSGNAEQVQEYKEALEAVLIKGKNGVPLLPELYSVPPDRVDEEYQNPHTVDRVPMGKLPHMWGQSLYILGSLMAEGFLAPGEIDPLNRRFSTVPKPDVVVQVSILAETEEIKTILKDKGIYVETIAEVYPIRVQPARILSHIYSSLGCNNRMKLSGRPYRHMGVLGTSKLYDIRKTIFTFTPQFIDQQQFYLALDNKMIVEMLRTDLSYLCSRWRMTGQPTITFPISHSMLDEDGTSLNSSILAALRKMQDGYFGGARVQTGKLSEFLTTSCCTHLSFMDPGPEGKLYSEDYDDNYDYLESGNWMNDYDSTSHARCGDEVARYLDHLLAHTAPHPKLAPTSQKGGLDRFQAAVQTTCDLMSLVTKAKELHVQNVHMYLPTKLFQASRPSFNLLDSPHPRQENQVPSVRVEIHLPRDQSGEVDFKALVLQLKETSSLQEQADILYMLYTMKGPDWNTELYNERSATVRELLTELYGKVGEIRHWGLIRYISGILRKKVEALDEACTDLLSHQKHLTVGLPPEPREKTISAPLPYEALTQLIDEASEGDMSISILTQEIMVYLAMYMRTQPGLFAEMFRLRIGLIIQVMATELAHSLRCSAEEATEGLMNLSPSAMKNLLHHILSGKEFGVERSVRPTDSNVSPAISIHEIGAVGATKTERTGIMQLKSEIKQVEFRRLSISAESQSPGTSMTPSSGSFPSAYDQQSSKDSRQGQWQRRRRLDGALNRVPVGFYQKVWKVLQKCHGLSVEGFVLPSSTTREMTPGEIKFSVHVESVLNRVPQPEYRQLLVEAILVLTMLADIEIHSIGSIIAVEKIVHIANDLFLQEQKTLGADDTMLAKDPASGICTLLYDSAPSGRFGTMTYLSKAAATYVQEFLPHSICAMQ

SEQ ID NO: 116 - protein, 1235 aa, Artificial Sequence
  PHKA2
MRSRSNSGVRLDGYARLVQQTILCYQNPVTGLLSASHEQKDAWVRDNIYSILAVWGLGMAYRKNADRDEDKAKAYELEQNVVKLMRGLLQCMMRQVAKVEKFKHTQSTKDSLHAKYNTATCGTVVGDDQWGHLQVDATSLFLLFLAQMTASGLRIIFTLDEVAFIQNLVFYIEAAYKVADYGMWERGDKTNQGIPELNASSVGMAKAALEAIDELDLFGAHGGRKSVIHVLPDEVEHCQSILFSMLPRASTSKEIDAGLLSIISFPAFAVEDVNLVNVTKNEIISKLQGRYGCCRFLRDGYKTPREDPNRLHYDPAELKLFENIECEWPVFWTYFIIDGVFSGDAVQVQEYREALEGILIRGKNGIRLVPELYAVPPNKVDEEYKNPHTVDRVPMGKVPHLWGQSLYILSSLLAEGFLAAGEIDPLNRRFSTSVKPDVVVQVTVLAENNHIKDLLRKHGVNVQSIADIHPIQVQPGRILSHIYAKLGRNKNMNLSGRPYRHIGVLGTSKLYVIRNQIFTFTPQFTDQHHFYLALDNEMIVEMLRIELAYLCTCWRMTGRPTLTFPISRTMLTNDGSDIHSAVLSTIRKLEDGYFGGARVKLGNLSEFLTTSFYTYLTFLDPDCDEKLFDNASEGTFSPDSDSDLVGYLEDTCNQESQDELDHYINHLLQSTSLRSYLPPLCKNTEDRHVFSAIHSTRDILSVMAKAKGLEVPFVPMTLPTKVLSAHRKSLNLVDSPQPLLEKVPESDFQWPRDDHGDVDCEKLVEQLKDCSNLQDQADILYILYVIKGPSWDTNLSGQHGVTVQNLLGELYGKAGLNQEWGLIRYISGLLRKKVEVLAEACTDLLSHQKQLTVGLPPEPREKIISAPLPPEELTKLIYEASGQDISIAVLTQEIVVYLAMYVRAQPSLFVEMLRLRIGLIIQVMATELARSLNCSGEEASESLMNLSPFDMKNLLHHILSGKEFGVERSVRPIHSSTSSPTISIHEVGHTGVTKTERSGINRLRSEMKQMTRRFSADEQFFSVGQAASSSAHSSKSARSSTPSSPTGTSSSDSGGHHIGWGERQGQWLRRRRLDGAINRVPVGFYQRVWKILQKCHGLSIDGYVLPSSTTREMTPHEIKFAVHVESVLNRVPQPEYRQLLVEAIMVLTLLSDTEMTSIGGIIHVDQIVQMASQLFLQDQVSIGAMDTLEKDQATGICHFFYDSAPSGAYGTMTYLTRAVASYLQELLPNSGCQMQ

SEQ ID NO: 117 - protein, 1093 aa, Artificial Sequence
  PHKB
MAGAAGLTAEVSWKVLERRARTKRSGSVYEPLKSINLPRPDNETLWDKLDHYYRIVKSTLLLYQSPTTGLFPTKTCGGDQKAKIQDSLYCAAGAWALALAYRRIDDDKGRTHELEHSAIKCMRGILYCYMRQADKVQQFKQDPRPTTCLHSVFNVHTGDELLSYEEYGHLQINAVSLYLLYLVEMISSGLQIIYNTDEVSFIQNLVFCVERVYRVPDFGVWERGSKYNNGSTELHSSSVGLAKAALEAINGFNLFGNQGCSWSVIFVDLDAHNRNRQTLCSLLPRESRSHNTDAALLPCISYPAFALDDEVLFSQTLDKVVRKLKGKYGFKRFLRDGYRTSLEDPNRCYYKPAEIKLFDGIECEFPIFFLYMMIDGVFRGNPKQVQEYQDLLTPVLHHTTEGYPVVPKYYYVPADFVEYEKNNPGSQKRFPSNCGRDGKLFLWGQALYIIAKLLADELISPKDIDPVQRYVPLKDQRNVSMRFSNQGPLENDLVVHVALIAESQRLQVFLNTYGIQTQTPQQVEPIQIWPQQELVKAYLQLGINEKLGLSGRPDRPIGCLGTSKIYRILGKTVVCYPIIFDLSDFYMSQDVFLLIDDIKNALQFIKQYWKMHGRPLFLVLIREDNIRGSRFNPILDMLAALKKGIIGGVKVHVDRLQTLISGAVVEQLDFLRISDTEELPEFKSFEELEPPKHSKVKRQSSTPSAPELGQQPDVNISEWKDKPTHEILQKLNDCSCLASQAILLGILLKREGPNFITKEGTVSDHIERVYRRAGSQKLWLAVRYGAAFTQKFSSSIAPHITTFLVHGKQVTLGAFGHEEEVISNPLSPRVIQNIIYYKCNTHDEREAVIQQELVIHIGWIISNNPELFSGMLKIRIGWIIHAMEYELQIRGGDKPALDLYQLSPSEVKQLLLDILQPQQNGRCWLNRRQIDGSLNRTPTGFYDRVWQILERTPNGIIVAGKHLPQQPTLSDMTMYEMNFSLLVEDTLGNIDQPQYRQIVVELLMVVSIVLERNPELEFQDKVDLDRLVKEAFNEFQKDQSRLKEIEKQDDMTSFYNTPPLGKRGTCSYLTKAVMNLLLEGEVKPNNDDPCLIS

SEQ ID NO: 118 - protein, 406 aa, Artificial Sequence
  PHKG2
MTLDVGPEDELPDWAAAKEFYQKYDPKDVIGRGVSSVVRRCVHRATGHEFAVKIMEVTAERLSPEQLEEVREATRRETHILRQVAGHPHIITLIDSYESSSFMFLVFDLMRKGELFDYLTEKVALSEKETRSIMRSLLEAVSFLHANNIVHRDLKPENILLDDNMQIRLSDFGFSCHLEPGEKLRELCGTPGYLAPEILKCSMDETHPGYGKEVDLWACGVILFTLLAGSPPFWHRRQILMLRMIMEGQYQFSSPEWDDRSSTVKDLISRLLQVDPEARLTAEQALQHPFFERCEGSQPWNLTPRQRFRVAVWTVLAAGRVALSTHRVRPLTKNALLRDPYALRSVRHLIDNCAFRLYGHWVKKGEQQNRAALFQHRPPGPFPIMGPEEEGDSAAITEDEAVLVLG

SEQ ID NO: 119 - protein, 429 aa, Artificial Sequence
  SLC37A4
MAAQGYGYYRTVIFSAMFGGYSLYYFNRKTFSFVMPSLVEEIPLDKDDLGFITSSQSAAYAISKFVSGVLSDQMSARWLFSSGLLLVGLVNIFFAWSSTVPVFAALWFLNGLAQGLGWPPCGKVLRKWFEPSQFGTWWAILSTSMNLAGGLGPILATILAQSYSWRSTLALSGALCVVVSFLCLLLIHNEPADVGLRNLDPMPSEGKKGSLKEESTLQELLLSPYLWVLSTGYLVVFGVKTCCTDWGQFFLIQEKGQSALVGSSYMSALEVGGLVGSIAAGYLSDRAMAKAGLSNYGNPRHGLLLFMMAGMTVSMYLFRVTVTSDSPKLWILVLGAVFGFSSYGPIALFGVIANESAPPNLCGTSHAIVGLMANVGGFLAGLPFSTIAKHYSWSTAFWVAEVICAASTAAFFLLRNIRTKMGRVSKKAE

SEQ ID NO: 120 - protein, 246 aa, Artificial Sequence
  PMM2
MAAPGPALCLFDVDGTLTAPRQKITKEMDDFLQKLRQKIKIGVVGGSDFEKVQEQLGNDVVEKYDYVFPENGLVAYKDGKLLCRQNIQSHLGEALIQDLINYCLSYIAKIKLPKKRGTFIEFRNGMLNVSPIGRSCSQEERIEFYELDKKENIRQKFVADLRKEFAGKGLTFSIGGQISFDVFPDGWDKRYCLRHVENDGYKTIYFFGDKTMPGGNDHEIFTDPRTMGYSVTAPEDTRRICELLFS

SEQ ID NO: 121 - protein, 551 aa, Artificial Sequence
  CBS
MPSETPQAEVGPTGCPHRSGPHSAKGSLEKGSPEDKEAKEPLWIRPDAPSRCTWQLGRPASESPHHHTAPAKSPKILPDILKKIGDTPMVRINKIGKKFGLKCELLAKCEFFNAGGSVKDRISLRMIEDAERDGTLKPGDTIIEPTSGNTGIGLALAAAVRGYRCIIVMPEKMSSEKVDVLRALGAEIVRTPTNARFDSPESHVGVAWRLKNEIPNSHILDQYRNASNPLAHYDTTADEILQQCDGKLDMLVASVGTGGTITGIARKLKEKCPGCRIIGVDPEGSILAEPEELNQTEQTTYEVEGIGYDFIPTVLDRTVVDKWFKSNDEEAFTFARMLIAQEGLLCGGSAGSTVAVAVKAAQELQEGQRCVVILPDSVRNYMTKFLSDRWMLQKGFLKEEDLTEKKPWWWHLRVQELGLSAPLTVLPTITCGHTIEILREKGFDQAPVVDEAGVILGMVTLGNMLSSLLAGKVQPSDQVGKVIYKQFKQIRLTDTLGRLSHILEMDHFALVVHEQIQYHSTGKSSQRQMVFGVVTAIDLLNFVAAQERDQK

SEQ ID NO: 122 - protein, 419 aa, Artificial Sequence
  FAH
MSFIPVAEDSDFPIHNLPYGVFSTRGDPRPRIGVAIGDQILDLSIIKHLFTGPVLSKHQDVFNQPTLNSFMGLGQAAWKEARVFLQNLLSVSQARLRDDTELRKCAFISQASATMHLPATIGDYTDFYSSRQHATNVGIMFRDKENALMPNWLHLPVGYHGRASSVVVSGTPIRRPMGQMKPDDSKPPVYGACKLLDMELEMAFFVGPGNRLGEPIPISKAHEHIFGMVLMNDWSARDIQKWEYVPLGPFLGKSFGTTVSPWVVPMDALMPFAVPNPKQDPRPLPYLCHDEPYTFDINLSVNLKGEGMSQAATICKSNFKYMYWTMLQQLTHHSVNGCNLRPGDLLASGTISGPEPENFGSMLELSWKGTKPIDLGNGQTRKFLLDGDEVIITGYCQGDGYRIGFGQCAGKVLPALLPS

SEQ ID NO: 123 - protein, 454 aa, Artificial Sequence [sequence omitted]

SEQ ID NO: 124 - protein, 379 aa, Artificial Sequence
  GALT
MSRSGTDPQQRQQASEADAAAATFRANDHQHIRYNPLQDEWVLVSAHRMKRPWQGQVEPQLLKTVPRHDPLNPLCPGAIRANGEVNPQYDSTFLFDNDFPALQPDAPSPGPSDHPLFQAKSARGVCKVMCFHPWSDVTLPLMSVPEIRAVVDAWASVTEELGAQYPWVQIFENKGAMMGCSNPHPHCQVWASSFLPDIAQREERSQQAYKSQHGEPLLMEYSRQELLRKERLVLTSEHWLVLVPFWATWPYQTLLLPRRHVRRLPELTPAERDDLASIMKKLLTKYDNLFETSFPYSMGWHGAPTGSEAGANWNHWQLHAHYYPPLLRSATVRKFMVGYEMLAQAQRDLTPEQAAERLRALPEVHYHLGQKDRETATIA

SEQ ID NO: 125 - protein, 392 aa, Artificial Sequence
  GALK1
MAALRQPQVAELLAEARRAFREEFGAEPELAVSAPGRVNLIGEHTDYNQGLVLPMALELMTVLVGSPRKDGLVSLLTTSEGADEPQRLQFPLPTAQRSLEPGTPRWANYVKGVIQYYPAAPLPGFSAVVVSSVPLGGGLSSSASLEVATYTFLQQLCPDSGTIAARAQVCQQAEHSFAGMPCGIMDQFISLMGQKGHALLIDCRSLETSLVPLSDPKLAVLITNSNVRHSLASSEYPVRRRQCEEVARALGKESLREVQLEELEAARDLVSKEGFRRARHVVGEIRRTAQAAAALRRGDYRAFGRLMVESHRSLRDDYEVSCPELDQLVEAALAVPGVYGSRMTGGGFGGCTVTLLEASAAPHAMRHIQEHYGGTATFYLSQAADGAKVLCL

SEQ ID NO: 126 - protein, 348 aa, Artificial Sequence
  GALE
MAEKVLVTGGAGYIGSHTVLELLEAGYLPVVIDNFHNAFRGGGSLPESLRRVQELTGRSVEFEEMDILDQGALQRLFKKYSFMAVIHFAGLKAVGESVQKPLDYYRVNLTGTIQLLEIMKAHGVKNLVFSSSATVYGNPQYLPLDEAHPTGGCTNPYGKSKFFIEEMIRDLCQADKTWNAVLLRYFNPTGAHASGCIGEDPQGIPNNLMPYVSQVAIGRREALNVFGNDYDTEDGTGVRDYIHVVDLAKGHIAALRKLKEQCGCRIYNLGTGTGYSVLQMVQAMEKASGKKIPYKVVARREGDVAACYANPSLAQEELGWTAALGLDRMCEDLWRWQKQNPSGFGTQA

SEQ ID NO: 127 - protein, 515 aa, Artificial Sequence [sequence omitted]

SEQ ID NO: 128 - protein, 685 aa, Artificial Sequence
  SLC3A1
MAEDKSKRDSIEMSMKGCQTNNGFVHNEDILEQTPDPGSSTDNLKHSTRGILGSQEPDFKGVQPYAGMPKEVLFQFSGQARYRIPREILFWLTVASVLVLIAATIAIIALSPKCLDWWQEGPMYQIYPRSFKDSNKDGNGDLKGIQDKLDYITALNIKTVWITSFYKSSLKDFRYGVEDFREVDPIFGTMEDFENLVAAIHDKGLKLIIDFIPNHTSDKHIWFQLSRTRTGKYTDYYIWHDCTHENGKTIPPNNWLSVYGNSSWHFDEVRNQCYFHQFMKEQPDLNFRNPDVQEEIKEILRFWLTKGVDGFSLDAVKFLLEAKHLRDEIQVNKTQIPDTVTQYSELYHDFTTTQVGMHDIVRSFRQTMDQYSTEPGRYRFMGTEAYAESIDRTVMYYGLPFIQEADFPFNNYLSMLDTVSGNSVYEVITSWMENMPEGKWPNWMIGGPDSSRLTSRLGNQYVNVMNMLLFTLPGTPITYYGEEIGMGNIVAANLNESYDINTLRSKSPMQWDNSSNAGFSEASNTWLPTNSDYHTVNVDVQKTQPRSALKLYQDLSLLHANELLLNRGWFCHLRNDSHYVVYTRELDGIDRIFIVVLNFGESTLLNLHNMISGLPAKMRIRLSTNSADKGSKVDTSGIFLDKGEGLIFEHNTKNLLHRQTAFRDRCFVSNRACYSSVLNILYTSC

SEQ ID NO: 129 - protein, 487 aa, Artificial Sequence
  SLC7A9
MGDTGLRKRREDEKSIQSQEPKTTSLQKELGLISGISIIVGTIIGSGIFVSPKSVLSNTEAVGPCLIIWAACGVLATLGALCFAELGTMITKSGGEYPYLMEAYGPIPAYLFSWASLIVIKPTSFAIICLSFSEYVCAPFYVGCKPPQIVVKCLAAAAILFISTVNSLSVRLGSYVQNIFTAAKLVIVAIIIISGLVLLAQGNTKNFDNSFEGAQLSVGAISLAFYNGLWAYDGWNQLNYITEELRNPYRNLPLAIIIGIPLVTACYILMNVSYFTVMTATELLQSQAVAVTFGDRVLYPASWIVPLFVAFSTIGAANGTCFTAGRLIYVAGREGHMLKVLSYISVRRLTPAPAIIFYGIIATIYIIPGDINSLVNYFSFAAWLFYGLTILGLIVMRFTRKELERPIKVPVVIPVLMTLISVFLVLAPIISKPTWEYLYCVLFILSGLLFYFLFVHYKFGWAQKISKPITMHLQMLMEVVPPEEDPE

SEQ ID NO: 130 - protein, 656 aa, Artificial Sequence [sequence omitted]

SEQ ID NO: 131 - protein, 1265 aa, Artificial Sequence
  MTR
MSPALQDLSQPEGLKKTLRDEINAILQKRIMVLDGGMGTMIQREKLNEEHFRGQEFKDHARPLKGNNDILSITQPDVIYQIHKEYLLAGADIIETNTFSSTSIAQADYGLEHLAYRMNMCSAGVARKAAEEVTLQTGIKRFVAGALGPTNKTLSVSPSVERPDYRNITFDELVEAYQEQAKGLLDGGVDILLIETIFDTANAKAALFALQNLFEEKYAPRPIFISGTIVDKSGRTLSGQTGEGFVISVSHGEPLCIGLNCALGAAEMRPFIEIIGKCTTAYVLCYPNAGLPNTFGDYDETPSMMAKHLKDFAMDGLVNIVGGCCGSTPDHIREIAEAVKNCKPRVPPATAFEGHMLLSGLEPFRIGPYTNFVNIGERCNVAGSRKFAKLIMAGNYEEALCVAKVQVEMGAQVLDVNMDDGMLDGPSAMTRFCNLIASEPDIAKVPLCIDSSNFAVIEAGLKCCQGKCIVNSISLKEGEDDFLEKARKIKKYGAAMVVMAFDEEGQATETDTKIRVCTRAYHLLVKKLGFNPNDIIFDPNILTIGTGMEEHNLYAINFIHATKVIKETLPGARISGGLSNLSFSFRGMEAIREAMHGVFLYHAIKSGMDMGIVNAGNLPVYDDIHKELLQLCEDLIWNKDPEATEKLLRYAQTQGTGGKKVIQTDEWRNGPVEERLEYALVKGIEKHIIEDTEEARLNQKKYPRPLNIIEGPLMNGMKIVGDLFGAGKMFLPQVIKSARVMKKAVGHLIPFMEKEREETRVLNGTVEEEDPYQGTIVLATVKGDVHDIGKNIVGVVLGCNNFRVIDLGVMTPCDKILKAALDHKADIIGLSGLITPSLDEMIFVAKEMERLAIRIPLLIGGATTSKTHTAVKIAPRYSAPVIHVLDASKSVVVCSQLLDENLKDEYFEEIMEEYEDIRQDHYESLKERRYLPLSQARKSGFQMDWLSEPHPVKPTFIGTQVFEDYDLQKLVDYIDWKPFFDVWQLRGKYPNRGFPKIFNDKTVGGEARKVYDDAHNMLNTLISQKKLRARGVVGFWPAQSIQDDIHLYAEAAVPQAAEPIATFYGLRQQAEKDSASTEPYYCLSDFIAPLHSGIRDYLGLFAVACFGVEELSKAYEDDGDDYSSIMVKALGDRLAEAFAEELHERVRRELWAYCGSEQLDVADLRRLRYKGIRPAPGYPSQPDHTEKLTMWRLADIEQSTGIRLTESLAMAPASAVSGLYFSNLKSKYFAVGKISKDQVEDYALRKNISVAEVEKWLGPILGYDTD

SEQ ID NO: 132 - protein, 725 aa, Artificial Sequence
  MTRR
MGAASVRAGARLVEVALCSFTVTCLEVMRRFLLLYATQQGQAKAIAEEICEQAVVHGFSADLHCISESDKYDLKTETAPLVVVVSTTGTGDPPDTARKFVKEIQNQTLPVDFFAHLRYGLLGLGDSEYTYFCNGGKIIDKRLQELGARHFYDTGHADDCVGLELVVEPWIAGLWPALRKHFRSSRGQEEISGALPVASPASSRTDLVKSELLHIESQVELLRFDDSGRKDSEVLKQNAVNSNQSNVVIEDFESSLTRSVPPLSQASLNIPGLPPEYLQVHLQESLGQEESQVSVTSADPVFQVPISKAVQLTTNDAIKTTLLVELDISNTDFSYQPGDAFSVICPNSDSEVQSLLQRLQLEDKREHCVLLKIKADTKKKGATLPQHIPAGCSLQFIFTWCLEIRAIPKKAFLRALVDYTSDSAEKRRLQELCSKQGAADYSRFVRDACACLLDLLLAFPSCQPPLSLLLEHLPKLQPRPYSCASSSLFHPGKLHFVFNIVEFLSTATTEVLRKGVCTGWLALLVASVLQPNIHASHEDSGKALAPKISISPRTTNSFHLPDDPSIPIIMVGPGTGIAPFIGFLQHREKLQEQHPDGNFGAMWLFFGCRHKDRDYLFRKELRHFLKHGILTHLKVSFSRDAPVGEEEAPAKYVQDNIQLHGQQVARILLQENGHIYVCGDAKNMAKDVHDALVQIISKEVGVEKLEAMKTLATLKEEKRYLQDIWS

SEQ ID NO: 133 - protein, 1465 aa, Artificial Sequence
  ATP7B
MPEQERQITAREGASRKILSKLSLPTRAWEPAMKKSFAFDNVGYEGGLDGLGPSSQVATSTVRILGMTCQSCVKSIEDRISNLKGIISMKVSLEQGSATVKYVPSVVCLQQVCHQIGDMGFEASIAEGKAASWPSRSLPAQEAVVKLRVEGMTCQSCVSSIEGKVRKLQGVVRVKVSLSNQEAVITYQPYLIQPEDLRDHVNDMGFEAAIKSKVAPLSLGPIDIERLQSTNPKRPLSSANQNFNNSETLGHQGSHVVTLQLRIDGMHCKSCVLNIEENIGQLLGVQSIQVSLENKTAQVKYDPSCTSPVALQRAIEALPPGNFKVSLPDGAEGSGTDHRSSSSHSPGSPPRNQVQGTCSTTLIAIAGMTCASCVHSIEGMISQLEGVQQISVSLAEGTATVLYNPSVISPEELRAAIEDMGFEASVVSESCSTNPLGNHSAGNSMVQTTDGTPTSVQEVAPHTGRLPANHAPDILAKSPQSTRAVAPQKCFLQIKGMTCASCVSNIERNLQKEAGVLSVLVALMAGKAEIKYDPEVIQPLEIAQFIQDLGFEAAVMEDYAGSDGNIELTITGMTCASCVHNIESKLTRTNGITYASVALATSKALVKFDPEIIGPRDIIKIIEEIGFHASLAQRNPNAHHLDHKMEIKQWKKSFLCSLVFGIPVMALMIYMLIPSNEPHQSMVLDHNIIPGLSILNLIFFILCTFVQLLGGWYFYVQAYKSLRHRSANMDVLIVLATSIAYVYSLVILVVAVAEKAERSPVTFFDTPPMLFVFIALGRWLEHLAKSKTSEALAKLMSLQATEATVVTLGEDNLIIREEQVPMELVQRGDIVKVVPGGKFPVDGKVLEGNTMADESLITGEAMPVTKKPGSTVIAGSINAHGSVLIKATHVGNDTTLAQIVKLVEEAQMSKAPIQQLADRFSGYFVPFIIIMSTLTLVVWIVIGFIDFGVVQRYFPNPNKHISQTEVIIRFAFQTSITVLCIACPCSLGLATPTAVMVGTGVAAQNGILIKGGKPLEMAHKIKTVMFDKTGTITHGVPRVMRVLLLGDVATLPLRKVLAVVGTAEASSEHPLGVAVTKYCKEELGTETLGYCTDFQAVPGCGIGCKVSNVEGILAHSERPLSAPASHLNEAGSLPAEKDAVPQTFSVLIGNREWLRRNGLTISSDVSDAMTDHEMKGQTAILVAIDGVLCGMIAIADAVKQEAALAVHTLQSMGVDVVLITGDNRKTARAIATQVGINKVFAEVLPSHKVAKVQELQNKGKKVAMVGDGVNDSPALAQADMGVAIGTGTDVAIEAADVVLIRNDLLDVVASIHLSKRTVRRIRINLVLALIYNLVGIPIAAGVFMPIGIVLQPWMGSAAMAASSVSVVLSSLQLKCYKKPDLERYEAQAHGHMKPLTASQVSVHIGMDDRWRDSPRATPWDQVSYVSQVSLSSLTSDKPSRHSAAADDDGDKWSLLLNGRDEEQYI

SEQ ID NO: 134 - protein, 218 aa, Artificial Sequence
  HPRT1
MATRSPGVVISDDEPGYDLDLFCIPNHYAEDLERVFIPHGLIMDRTERLARDVMKEMGGHHIVALCVLKGGYKFFADLLDYIKALNRNSDRSIPMTVDFIRLKSYCNDQSTGDIKVIGGDDLSTLTGKNVLIVEDIIDTGKTMQTLLSLVRQYNPKMVKVASLLVKRTPRSVGYKPDFVGFEIPDKFVVGYALDYNEYFRDLNHVCVISETGKAKYKA

SEQ ID NO: 135 - protein, 426 aa, Artificial Sequence
  HJV
MGEPGQSPSPRSSHGSPPTLSTLTLLLLLCGHAHSQCKILRCNAEYVSSTLSLRGGGSSGALRGGGGGGRGGGVGSGGLCRALRSYALCTRRTARTCRGDLAFHSAVHGIEDLMIQHNCSRQGPTAPPPPRGPALPGAGSGLPAPDPCDYEGRFSRLHGRPPGFLHCASFGDPHVRSFHHHFHTCRVQGAWPLLDNDFLFVQATSSPMALGANATATRKLTIIFKNMQECIDQKVYQAEVDNLPVAFEDGSINGGDRPGGSSLSIQTANPGNHVEIQAAYIGTTIIIRQTAGQLSFSIKVAEDVAMAFSAEQDLQLCVGGCPPSQRLSRSERNRRGAITIDTARRLCKEGLPVEDAYFHSCVFDVLISGDPNFTVAAQAALEDARAFLPDLEKLHLFPSDAGVPLSSATLLAPLLSGLFVLWLCIQ

SEQ ID NO: 136 - protein, 84 aa, Artificial Sequence
  HAMP
MALSSQIWAACLLLLLLLASLTSGSVFPQQTGQLAELQPQDRAGARASWMPMFQRRRRRDTHFPICIFCCGCCHRSKCGMCCKT

SEQ ID NO: 137 - protein, 1218 aa, Artificial Sequence
  JAG1
MRSPRTRGRSGRPLSLLLALLCALRAKVCGASGQFELEILSMQNVNGELQNGNCCGGARNPGDRKCTRDECDTYFKVCLKEYQSRVTAGGPCSFGSGSTPVIGGNTFNLKASRGNDRNRIVLPFSFAWPRSYTLLVEAWDSSNDTVQPDSIIEKASHSGMINPSRQWQTLKQNTGVAHFEYQIRVTCDDYYYGFGCNKFCRPRDDFFGHYACDQNGNKTCMEGWMGPECNRAICRQGCSPKHGSCKLPGDCRCQYGWQGLYCDKCIPHPGCVHGICNEPWQCLCETNWGGQLCDKDLNYCGTHQPCLNGGTCSNTGPDKYQCSCPEGYSGPNCEIAEHACLSDPCHNRGSCKETSLGFECECSPGWTGPTCSTNIDDCSPNNCSHGGTCQDLVNGFKCVCPPQWTGKTCQLDANECEAKPCVNAKSCKNLIASYYCDCLPGWMGQNCDININDCLGQCQNDASCRDLVNGYRCICPPGYAGDHCERDIDECASNPCLNGGHCQNEINRFQCLCPTGFSGNLCQLDIDYCEPNPCQNGAQCYNRASDYFCKCPEDYEGKNCSHLKDHCRTTPCEVIDSCTVAMASNDTPEGVRYISSNVCGPHGKCKSQSGGKFTCDCNKGFTGTYCHENINDCESNPCRNGGTCIDGVNSYKCICSDGWEGAYCETNINDCSQNPCHNGGTCRDLVNDFYCDCKNGWKGKTCHSRDSQCDEATCNNGGTCYDEGDAFKCMCPGGWEGTTCNIARNSSCLPNPCHNGGTCVVNGESFTCVCKEGWEGPICAQNTNDCSPHPCYNSGTCVDGDNWYRCECAPGFAGPDCRININECQSSPCAFGATCVDEINGYRCVCPPGHSGAKCQEVSGRPCITMGSVIPDGAKWDDDCNTCQCLNGRIACSKVWCGPRPCLLHKGHSECPSGQSCIPILDDQCFVHPCTGVGECRSSSLQPVKTKCTSDSYYQDNCANITFTFNKEMMSPGLTTEHICSELRNLNILKNVSAEYSIYIACEPSPSANNEIHVAISAEDIRDDGNPIKEITDKIIDLVSKRDGNSSLIAAVAEVRVQRRPLKNRTDFLVPLLSSVLTVAWICCLVTAFYWCLRKRRKPGSHTHSASEDNTTNNVREQLNQIKNPIEKHGANTVPIKDYENKNSKMSKIRTHNSEVEEDDMDKHQQKARFAKQPAYTLVDREEKPPNGTPTKHPNWTNKQDNRDLESAQSLNRMEYIV

SEQ ID NO: 138 - protein, 147 aa, Artificial Sequence
  TTR
MASHRLLLLCLAGLVFVSEAGPTGTGESKCPLMVKVLDAVRGSPAINVAVHVFRKAADDTWEPFASGKTSESGELHGLTTEEEFVEGIYKVEIDTKSYWKALGISPFHEHAEVVFTANDSGPRRYTIAALLSPYSYSTTAVVTNPKE

SEQ ID NO: 139 - protein, 392 aa, Artificial Sequence
  AGXT
MASHKLLVTPPKALLKPLSIPNQLLLGPGPSNLPPRIMAAGGLQMIGSMSKDMYQIMDEIKEGIQYVFQTRNPLTLVISGSGHCALEAALVNVLEPGDSFLVGANGIWGQRAVDIGERIGARVHPMTKDPGGHYTLQEVEEGLAQHKPVLLFLTHGESSTGVLQPLDGFGELCHRYKCLLLVDSVASLGGTPLYMDRQGIDILYSGSQKALNAPPGTSLISFSDKAKKKMYSRKTKPFSFYLDIKWLANFWGCDDQPRMYHHTIPVISLYSLRESLALIAEQGLENSWRQHREAAAYLHGRLQALGLQLFVKDPALRLPTVTTVAVPAGYDWRDIVSYVIDHFDIEIMGGLGPSTGKVLRIGLLGCNATRENVDRVTEALRAALQHCPKKKL

SEQ ID NO: 140 - protein, 399 aa, Artificial Sequence
  LIPA
MKMRFLGLVVCLVLWTLHSEGSGGKLTAVDPETNMNVSEIISYWGFPSEEYLVETEDGYILCLNRIPHGRKNHSDKGPKPVVFLQHGLLADSSNWVTNLANSSLGFILADAGFDVWMGNSRGNTWSRKHKTLSVSQDEFWAFSYDEMAKYDLPASINFILNKTGQEQVYYVGHSQGTTIGFIAFSQIPELAKRIKMFFALGPVASVAFCTSPMAKLGRLPDHLIKDLFGDKEFLPQSAFLKWLGTHVCTHVILKELCGNLCFLLCGFNERNLNMSRVDVYTTHSPAGTSVQNMLHWSQAVKFQKFQAFDWGSSAKNYFHYNQSYPPTYNVKDMLVPTAVWSGGHDWLADVYDVNILLTQITNLVFHESIPEWEHLDFIWGLDAPWRLYNKIINLMRKYQ

SEQ ID NO: 141 - protein, 500 aa, Artificial Sequence
  SERPING1
MASRLTLLTLLLLLLAGDRASSNPNATSSSSQDPESLQDRGEGKVATTVISKMLFVEPILEVSSLPTTNSTTNSATKITANTTDEPTTQPTTEPTTQPTIQPTQPTTQLPTDSPTQPTTGSFCPGPVTLCSDLESHSTEAVLGDALVDFSLKLYHAFSAMKKVETNMAFSPFSIASLLTQVLLGAGENTKTNLESILSYPKDFTCVHQALKGFTTKGVTSVSQIFHSPDLAIRDTFVNASRTLYSSSPRVLSNNSDANLELINTWVAKNTNNKISRLLDSLPSDTRLVLLNAIYLSAKWKTTFDPKKTRMEPFHFKNSVIKVPMMNSKKYPVAHFIDQTLKAKVGQLQLSHNLSLVILVPQNLKHRLEDMEQALSPSVFKAIMEKLEMSKFQPTLLTLPRIKVTTSQDMLSIMEKLEFFDFSYDLNLCGLTEDPDLQVSAMQHQTVLELTETGVEAAAASAISVARTLLVFEVQQPFLFVLWDQQHKFPVFMGRVYDPRA

SEQ ID NO: 142 - protein, 736 aa, Artificial Sequence
  HSD17B4
MGSPLRFDGRVVLVTGAGAGLGRAYALAFAERGALVVVNDLGGDFKGVGKGSLAADKVVEEIRRRGGKAVANYDSVEEGEKVVKTALDAFGRIDVVVNNAGILRDRSFARISDEDWDIIHRVHLRGSFQVTRAAWEHMKKQKYGRIIMTSSASGIYGNFGQANYSAAKLGLLGLANSLAIEGRKSNIHCNTIAPNAGSRMTQTVMPEDLVEALKPEYVAPLVLWLCHESCEENGGLFEVGAGWIGKLRWERTLGAIVRQKNHPMTPEAVKANWKKICDFENASKPQSIQESTGSIIEVLSKIDSEGGVSANHTSRATSTATSGFAGAIGQKLPPFSYAYTELEAIMYALGVGASIKDPKDLKFIYEGSSDFSCLPTFGVIIGQKSMMGGGLAEIPGLSINFAKVLHGEQYLELYKPLPRAGKLKCEAVVADVLDKGSGVVIIMDVYSYSEKELICHNQFSLFLVGSGGFGGKRTSDKVKVAVAIPNRPPDAVLTDTTSLNQAALYRLSGDWNPLHIDPNFASLAGFDKPILHGLCTFGFSARRVLQQFADNDVSRFKAIKARFAKPVYPGQTLQTEMWKEGNRIHFQTKVQETGDIVISNAYVDLAPTSGTSAKTPSEGGKLQSTFVFEEIGRRLKDIGPEVVKKVNAVFEWHITKGGNIGAKWTIDLKSGSGKVYQGPAKGAADTTIILSDEDFMEVVLGKLDPQKAFFSGRLKARGNIMLSQKLQMILKDYAKL

SEQ ID NO: 143 - protein, 367 aa, Artificial Sequence
  UROD
MEANGLGPQGFPELKNDTFLRAAWGEETDYTPVWCMRQAGRYLPEFRETRAAQDFFSTCRSPEACCELTLQPLRRFPLDAAIIFSDILVVPQALGMEVTMVPGKGPSFPEPLREEQDLERLRDPEVVASELGYVFQAITLTRQRLAGRVPLIGFAGAPWTLMTYMVEGGGSSTMAQAKRWLYQRPQASHQLLRILTDALVPYLVGQVVAGAQALQLFESHAGHLGPQLFNKFALPYIRDVAKQVKARLREAGLAPVPMIIFAKDGHFALEELAQAGYEVVGLDWTVAPKKARECVGKTVTLQGNLDPCALYASEEEIGQLVKQMLDDFGPHRYIANLGHGLYPDMDPEHVGAFVDAVHKHSRLLRQN

SEQ ID NO: 144 - protein, 348 aa, Artificial Sequence
  HFE
MGPRARPALLLLMLLQTAVLQGRLLRSHSLHYLFMGASEQDLGLSLFEALGYVDDQLFVFYDHESRRVEPRTPWVSSRISSQMWLQLSQSLKGWDHMFTVDFWTIMENHNHSKESHTLQVILGCEMQEDNSTEGYWKYGYDGQDHLEFCPDTLDWRAAEPRAWPTKLEWERHKIRARQNRAYLERDCPAQLQQLLELGRGVLDQQVPPLVKVTHHVTSSVTTLRCRALNYYPQNITMKWLKDKQPMDAKEFEPKDVLPNGDGTYQGWITLAVPPGEEQRYTCQVEHPGLDQPLIVIWEPSPSGTLVIGVISGIAVFVVILFIGILFIILRKRQGSRGAMGHYVLAERE

SEQ ID NO: 145 - protein, 475 aa, Artificial Sequence
  LPL
MESKALLVLTLAVWLQSLTASRGGVAAADQRRDFIDIESKFALRTPEDTAEDTCHLIPGVAESVATCHFNHSSKTFMVIHGWTVTGMYESWVPKLVAALYKREPDSNVIVVDWLSRAQEHYPVSAGYTKLVGQDVARFINWMEEEFNYPLDNVHLLGYSLGAHAAGIAGSLTNKKVNRITGLDPAGPNFEYAEAPSRLSPDDADFVDVLHTFTRGSPGRSIGIQKPVGHVDIYPNGGTFQPGCNIGEAIRVIAERGLGDVDQLVKCSHERSIHLFIDSLLNEENPSKAYRCSSKEAFEKGLCLSCRKNRCNNLGYEINKVRAKRSSKMYLKTRSQMPYKVFHYQVKIHFSGTESETHTNQAFEISLYGTVAESENIPFTLPEVSTNKTYSFLIYTEVDIGELLMLKLKWKSDSYFSWSDWWSSPGFAIQKIRVKAGETQKKVIFCSREKVSHLQKGKAPAVFVKCHDKSLNKKSG

SEQ ID NO: 146 - protein, 328 aa, Artificial Sequence
  GRHPR
MRPVRLMKVFVTRRIPAEGRVALARAADCEVEQWDSDEPIPAKELERGVAGAHGLLCLLSDHVDKRILDAAGANLKVISTMSVGIDHLALDEIKKRGIRVGYTPDVLTDTTAELAVSLLLTTCRRLPEAIEEVKNGGWTSWKPLWLCGYGLTQSTVGIIGLGRIGQAIARRLKPFGVQRFLYTGRQPRPEEAAEFQAEFVSTPELAAQSDFIVVACSLTPATEGLCNKDFFQKMKETAVFINISRGDVVNQDDLYQALASGKIAAAGLDVTSPEPLPTNHPLLTLKNCVILPHIGSATHRTRNTMSLLAANNLLAGLRGEPMPSELKL

SEQ ID NO: 147 - protein, 327 aa, Artificial Sequence [sequence omitted]

SEQ ID NO: 148 - protein, 860 aa, Artificial Sequence [sequence omitted]

SEQ ID NO: 149 - protein, 415 aa, Artificial Sequence
  ACAD8
MLWSGCRRFGARLGCLPGGLRVLVQTGHRSLTSCIDPSMGLNEEQKEFQKVAFDFAAREMAPNMAEWDQKELFPVDVMRKAAQLGFGGVYIQTDVGGSGLSRLDTSVIFEALATGCTSTTAYISIHNMCAWMIDSFGNEEQRHKFCPPLCTMEKFASYCLTEPGSGSDAASLLTSAKKQGDHYILNGSKAFISGAGESDIYVVMCRTGGPGPKGISCIVVEKGTPGLSFGKKEKKVGWNSQPTRAVIFEDCAVPVANRIGSEGQGFLIAVRGLNGGRINIASCSLGAAHASVILTRDHLNVRKQFGEPLASNQYLQFTLADMATRLVAARLMVRNAAVALQEERKDAVALCSMAKLFATDECFAICNQALQMHGGYGYLKDYAVQQYVRDSRVHQILEGSNEVMRILISRSLLQE

SEQ ID NO: 150 - protein, 432 aa, Artificial Sequence
  ACADSB
MEGLAVRLLRGSRLLRRNFLTCLSSWKIPPHVSKSSQSEALLNITNNGIHFAPLQTFTDEEMMIKSSVKKFAQEQIAPLVSTMDENSKMEKSVIQGLFQQGLMGIEVDPEYGGTGASFLSTVLVIEELAKVDASVAVFCEIQNTLINTLIRKHGTEEQKATYLPQLTTEKVGSFCLSEAGAGSDSFALKTRADKEGDYYVLNGSKMWISSAEHAGLFLVMANVDPTIGYKGITSFLVDRDTPGLHIGKPENKLGLRASSTCPLTFENVKVPEANILGQIGHGYKYAIGSLNEGRIGIAAQMLGLAQGCFDYTIPYIKERIQFGKRLFDFQGLQHQVAHVATQLEAARLLTYNAARLLEAGKPFIKEASMAKYYASEIAGQTTSKCIEWMGGVGYTKDYPVEKYFRDAKIGTIYEGASNIQLNTIAKHIDAEY

SEQ ID NO: 151 - protein, 427 aa, Artificial Sequence
  ACAT1
MAVLAALLRSGARSRSPLLRRLVQEIRYVERSYVSKPTLKEVVIVSATRTPIGSFLGSLSLLPATKLGSIAIQGAIEKAGIPKEEVKEAYMGNVLQGGEGQAPTRQAVLGAGLPISTPCTTINKVCASGMKAIMMASQSLMCGHQDVMVAGGMESMSNVPYVMNRGSTPYGGVKLEDLIVKDGLTDVYNKIHMGSCAENTAKKLNIARNEQDAYAINSYTRSKAAWEAGKFGNEVIPVTVTVKGQPDVVVKEDEEYKRVDFSKVPKLKTVFQKENGTVTAANASTLNDGAAALVLMTADAAKRLNVTPLARIVAFADAAVEPIDFPIAPVYAASMVLKDVGLKKEDIAMWEVNEAFSLVVLANIKMLEIDPQKVNINGGAVSLGHPIGMSGARIVGHLTHALKQGEYGLASICNGGGGASAMLIQKL

SEQ ID NO: 152 - protein, 575 aa, Artificial Sequence
  ACSF3
MLPHVVLTFRRLGCALASCRLAPARHRGSGLLHTAPVARSDRSAPVFTRALAFGDRIALDQHGRHTYRELYSRSLRLSQEICRLCGCVGGDLREERVSFLCANDASYVVAQWASWMSGGVAVPLYRKHPAAQLEYVICDSQSSVVLASQEYLELLSPVVRKLGVPLLPLTPAIYTGAVEEPAEVPVPEQGWRNKGAMIIYTSGTTGRPKGVLSTHQNIRAVVTGLVHKWAWTKDDVILHVLPLHHVHGVVNALLCPLWVGATCVMMPEFSPQQVWEKFLSSETPRINVFMAVPTIYTKLMEYYDRHFTQPHAQDFLRAVCEEKIRLMVSGSAALPLPVLEKWKNITGHTLLERYGMTEIGMALSGPLTTAVRLPGSVGTPLPGVQVRIVSENPQREACSYTIHAEGDERGTKVTPGFEEKEGELLVRGPSVFREYWNKPEETKSAFTLDGWFKTGDTVVFKDGQYWIRGRTSVDIIKTGGYKVSALEVEWHLLAHPSITDVAVIGVPDMTWGQRVTAVVTLREGHSLSHRELKEWARNVLAPYAVPSELVLVEEIPRNQMGKIDKKALIRHFHPS

SEQ ID NO: 153 - protein, 313 aa, Artificial Sequence
  ASPA
MTSCHIAEEHIQKVAIFGGTHGNELTGVFLVKHWLENGAEIQRTGLEVKPFITNPRAVKKCTRYIDCDLNRIFDLENLGKKMSEDLPYEVRRAQEINHLFGPKDSEDSYDIIFDLHNTTSNMGCTLILEDSRNNFLIQMFHYIKTSLAPLPCYVYLIEHPSLKYATTRSIAKYPVGIEVGPQPQGVLRADILDQMRKMIKHALDFIHHFNEGKEFPPCAIEVYKIIEKVDYPRDENGEIAAIIHPNLQDQDWKPLHPGDPMFLTLDGKTIPLGGDCTVYPVFVNEAAYYEKKEAFAKTTKLTLNAKSIRCCLH

SEQ ID NO: 154 - protein, 339 aa, Artificial Sequence
  AUH
MAAAVAAAPGALGSLHAGGARLVAACSAWLCPGLRLPGSLAGRRAGPAIWAQGWVPAAGGPAPKRGYSSEMKTEDELRVRHLEEENRGIVVLGINRAYGKNSLSKNLIKMLSKAVDALKSDKKVRTIIIRSEVPGIFCAGADLKERAKMSSSEVGPFVSKIRAVINDIANLPVPTIAAIDGLALGGGLELALACDIRVAASSAKMGLVETKLAIIPGGGGTQRLPRAIGMSLAKELIFSARVLDGKEAKAVGLISHVLEQNQEGDAAYRKALDLAREFLPQGPVAMRVAKLAINQGMEVDLVTGLAIEEACYAQTIPTKDRLEGLLAFKEKRPPRYKGE

SEQ ID NO: 155 - protein, 116 aa, Artificial Sequence
  DNAJC19
MASTVVAVGLTIAAAGFAGRYVLQAMKHMEPQVKQVFQSLPKSAFSGGYYRGGFEPKMTKREAALILGVSPTANKGKIRDAHRRIMLLNHPDKGGSPYIAAKINEAKDLLEGQAKK

SEQ ID NO: 156 - protein, 254 aa, Artificial Sequence
  ETHE1
MAEAVLRVARRQLSQRGGSGAPILLRQMFEPVSCTFTYLLGDRESREAVLIDPVLETAPRDAQLIKELGLRLLYAVNTHCHADHITGSGLLRSLLPGCQSVISRLSGAQADLHIEDGDSIRFGRFALETRASPGHTPGCVTFVLNDHSMAFTGDALLIRGCGRTDFQQGCAKTLYHSVHEKIFTLPGDCLIYPAHDYHGFTVSTVEEERTLNPRLTLSCEEFVKIMGNLNLPKPQQIDFAVPANMRCGVQTPTA

SEQ ID NO: 157 - protein, 338 aa, Artificial Sequence [sequence omitted]

SEQ ID NO: 158 - protein, 541 aa, Artificial Sequence
  FTCD
MSQLVECVPNFSEGKNQEVIDAISGAITQTPGCVLLDVDAGPSTNRTVYTFVGPPECVVEGALNAARVASRLIDMSRHQGEHPRMGALDVCPFIPVRGVSVDECVLCAQAFGQRLAEELDVPVYLYGEAARMDSRRTLPAIRAGEYEALPKKLQQADWAPDFGPSSFVPSWGATATGARKFLIAFNINLLGTKEQAHRIALNLREQGRGKDQPGRLKKVQGIGWYLDEKNLAQVSTNLLDFEVTALHTVYEETCREAQELSLPVVGSQLVGLVPLKALLDAAAFYCEKENLFILEEEQRIRLVVSRLGLDSLCPFSPKERIIEYLVPERGPERGLGSKSLRAFVGEVGARSAAPGGGSVAAAAAAMGAALGSMVGLMTYGRRQFQSLDTTMRRLIPPFREASAKLTTLVDADAEAFTAYLEAMRLPKNTPEEKDRRTAALQEGLRRAVSVPLTLAETVASLWPALQELARCGNLACRSDLQVAAKALEMGVFGAYFNVLINLRDITDEAFKDQIHHRVSSLLQEAKTQAALVLDCLETRQE

SEQ ID NO: 159 - protein, 474 aa, Artificial Sequence
  GSS
MATNWGSLLQDKQQLEELARQAVDRALAEGVLLRTSQEPTSSEVVSYAPFTLFPSLVPSALLEQAYAVQMDFNLLVDAVSQNAAFLEQTLSSTIKQDDFTARLFDIHKQVLKEGIAQTVFLGLNRSDYMFQRSADGSPALKQIEINTISASFGGLASRTPAVHRHVLSVLSKTKEAGKILSNNPSKGLALGIAKAWELYGSPNALVLLIAQEKERNIFDQRAIENELLARNIHVIRRTFEDISEKGSLDQDRRLFVDGQEIAVVYFRDGYMPRQYSLQNWEARLLLERSHAAKCPDIATQLAGTKKVQQELSRPGMLEMLLPGQPEAVARLRATFAGLYSLDVGEEGDQAIAEALAAPSRFVLKPQREGGGNNLYGEEMVQALKQLKDSEERASYILMEKIEPEPFENCLLRPGSPARVVQCISELGIFGVYVRQEKTLVMNKHVGHLLRTKAIEHADGGVAAGVAVLDNPYPV

SEQ ID NO: 160 - protein, 386 aa, Artificial Sequence
  HIBCH
MGQREMWRLMSRFNAFKRTNTILHHLRMSKHTDAAEEVLLEKKGCTGVITLNRPKFLNALTLNMIRQIYPQLKKWEQDPETFLIIIKGAGGKAFCAGGDIRVISEAEKAKQKIAPVFFREEYMLNNAVGSCQKPYVALIHGITMGGGVGLSVHGQFRVATEKCLFAMPETAIGLFPDVGGGYFLPRLQGKLGYFLALTGFRLKGRDVYRAGIATHFVDSEKLAMLEEDLLALKSPSKENIASVLENYHTESKIDRDKSFILEEHMDKINSCFSANTVEEIIENLQQDGSSFALEQLKVINKMSPTSLKITLRQLMEGSSKTLQEVLTMEYRLSQACMRGHDFHEGVRAVLIDKDQSPKWKPADLKEVTEEDLNNHFKSLGSSDLKF

SEQ ID NO: 161 - protein, 452 aa, Artificial Sequence
  IDH2
MAGYLRVVRSLCRASGSRPAWAPAALTAPTSQEQPRRHYADKRIKVAKPVVEMDGDEMTRIIWQFIKEKLILPHVDIQLKYFDLGLPNRDQTDDQVTIDSALATQKYSVAVKCATITPDEARVEEFKLKKMWKSPNGTIRNILGGTVFREPIICKNIPRLVPGWTKPITIGRHAHGDQYKATDFVADRAGTFKMVFTPKDGSGVKEWEVYNFPAGGVGMGMYNTDESISGFAHSCFQYAIQKKWPLYMSTKNTILKAYDGRFKDIFQEIFDKHYKTDFDKNKIWYEHRLIDDMVAQVLKSSGGFVWACKNYDGDVQSDILAQGFGSLGLMTSVLVCPDGKTIEAEAAHGTVTRHYREHQKGRPTSTNPIASIFAWTRGLEHRGKLDGNQDLIRFAQMLEKVCVETVESGAMTKDLAGCIHGLSNVKLNEHFLNTTDFLDTIKSNLDRALGRQ

SEQ ID NO: 162 - protein, 463 aa, Artificial Sequence
  L2HGDH
MVPALRYLVGACGRARGLFAGGSPGACGFASGRPRPLCGGSRSASTSSFDIVIVGGGIVGLASARALILRHPSLSIGVLEKEKDLAVHQTGHNSGVIHSGIYYKPESLKAKLCVQGAALLYEYCQQKGISYKQCGKLIVAVEQEEIPRLQALYEKGLQNGVPGLRLIQQEDIKKKEPYCRGLMAIDCPHTGIVDYRQVALSFAQDFQEAGGSVLTNFEVKGIEMAKESPSRSIDGMQYPIVIKNTKGEEIRCQYVVTCAGLYSDRISELSGCTPDPRIVPFRGDYLLLKPEKCYLVKGNIYPVPDSRFPFLGVHFTPRMDGSIWLGPNAVLAFKREGYRPFDFSATDVMDIIINSGLIKLASQNFSYGVTEMYKACFLGATVKYLQKFIPEITISDILRGPAGVRAQALDRDGNLVEDFVFDAGVGDIGNRILHVRNAPSPAATSSIAISGMIADEVQQRFEL

SEQ ID NO: 163 - protein, 493 aa, Artificial Sequence
  MLYCD
MRGFGPGLTARRLLPLRLPPRPPGPRLASGQAAGALERAMDELLRRAVPPTPAYELREKTPAPAEGQCADFVSFYGGLAETAQRAELLGRLARGFGVDHGQVAEQSAGVLHLRQQQREAAVLLQAEDRLRYALVPRYRGLFHHISKLDGGVRFLVQLRADLLEAQALKLVEGPDVREMNGVLKGMLSEWFSSGFLNLERVTWHSPCEVLQKISEAEAVHPVKNWMDMKRRVGPYRRCYFFSHCSTPGEPLVVLHVALTGDISSNIQAIVKEHPPSETEEKNKITAAIFYSISLTQQGLQGVELGTFLIKRVVKELQREFPHLGVFSSLSPIPGFTKWLLGLLNSQTKEHGRNELFTDSECKEISEITGGPINETLKLLLSSSEWVQSEKLVRALQTPLMRLCAWYLYGEKHRGYALNPVANFHLQNGAVLWRINWMADVSLRGITGSCGLMANYRYFLEETGPNSTSYLGSKIIKASEQVLSLVAQFQKNSKL

SEQ ID NO: 164 - protein, 179 aa, Artificial Sequence
  OPA3
MVVGAFPMAKLLYLGIRQVSKPLANRIKEAARRSEFFKTYICLPPAQLYHWVEMRTKMRIMGFRGTVIKPLNEEAAAELGAELLGEATIFIVGGGCLVLEYWRHQAQQRHKEEEQRAAWNALRDEVGHLALALEALQAQVQAAPPQGALEELRTELQEVRAQLCNPGRSASHAVPASKK

SEQ ID NO: 165 - protein, 1288 aa, Artificial Sequence
  OPLAH
MGSPEGRFHFAIDRGGTFTDVFAQCPGGHVRVLKLLSEDPANYADAPTEGIRRILEQEAGMLLPRDQPLDSSHIASIRMGTTVATNALLERKGERVALLVTRGFRDLLHIGTQARGDLFDLAVPMPEVLYEEVLEVDERVVLHRGEAGTGTPVKGRTGDLLEVQQPVDLGALRGKLEGLLSRGIRSLAVVLMHSYTWAQHEQQVGVLARELGFTHVSLSSEAMPMVRIVPRGHTACADAYLTPAIQRYVQGFCRGFQGQLKDVQVLFMRSDGGLAPMDTFSGSSAVLSGPAGGVVGYSATTYQQEGGQPVIGFDMGGTSTDVSRYAGEFEHVFEASTAGVTLQAPQLDINTVAAGGGSRLFFRSGLFVVGPESAGAHPGPACYRKGGPVTVTDANLVLGRLLPASFPCIFGPGENQPLSPEASRKALEAVATEVNSFLTNGPCPASPLSLEEVAMGFVRVANEAMCRPIRALTQARGHDPSAHVLACFGGAGGQHACAIARALGMDTVHIHRHSGLLSALGLALADVVHEAQEPCSLLYAPETFVQLDQRLSRLEEQCVDALQAQGFPRSQISTESFLHLRYQGTDCALMVSAHQHPATARSPRAGDFGAAFVERYMREFGFVIPERPVVVDDVRVRGTGRSGLRLEDAPKAQTGPPRVDKMTQCYFEGGYQETPVYLLAELGYGHKLHGPCLIIDSNSTILVEPGCQAEVTKTGDICISVGAEVPGTVGPQLDPIQLSIFSHRFMSIAEQMGRILQRTAISTNIKERLDFSCALFGPDGGLVSNAPHIPVHLGAMQETVQFQIQHLGADLHPGDVLLSNHPSAGGSHLPDLTVITPVFWPGQTRPVFYVASRGHHADIGGITPGSMPPHSTMLQQEGAVFLSFKLVQGGVFQEEAVTEALRAPGKVPNCSGTRNLHDNLSDLRAQVAANQKGIQLVGELIGQYGLDVVQAYMGHIQANAELAVRDMLRAFGTSRQARGLPLEVSSEDHMDDGSPIRLRVQISLSQGSAVFDFSGTGPEVFGNLNAPRAVTLSALIYCLRCLVGRDIPLNQGCLAPVRVVIPRGSILDPSPEAAVVGGNVLTSQRVVDVILGAFGACAASQGCMNNVTLGNAHMGYYETVAGGAGAGPSWHGRSGVHSHMTNTRITDPEILESRYPVILRRFELRRGSGGRGRFRGGDGVTRELLFREEALLSVLTERRAFRPYGLHGGEPGARGLNLLIRKNGRTVNLGGKTSVTVYPGDVFCLHTPGGGGYGDPEDPAPPPGSPPQALAFPEHGSVYEYRRAQEAV

SEQ ID NO: 166 - protein, 520 aa, Artificial Sequence
  OXCT1
MAALKLLSSGLRLCASARGSGATWYKGCVCSFSTSAHRHTKFYTDPVEAVKDIPDGATVLVGGFGLCGIPENLIDALLKTGVKGLTAVSNNAGVDNFGLGLLLRSKQIKRMVSSYVGENAEFERQYLSGELEVELTPQGTLAERIRAGGAGVPAFYTPTGYGTLVQEGGSPIKYNKDGSVAIASKPREVREFNGQHFILEEAITGDFALVKAWKADRAGNVIFRKSARNFNLPMCKAAETTVVEVEEIVDIGAFAPEDIHIPQIYVHRLIKGEKYEKRIERLSIRKEGDGEAKSAKPGDDVRERIIKRAALEFEDGMYANLGIGIPLLASNFISPNITVHLQSENGVLGLGPYPRQHEADADLINAGKETVTILPGASFFSSDESFAMIRGGHVDLTMLGAMQVSKYGDLANWMIPGKMVKGMGGAMDLVSSAKTKVVVTMEHSAKGNAHKIMEKCTLPLTGKQCVNRIITEKAVFDVDKKKGLTLIELWEGLTVDDVQKSTGCDFAVSPKLMPMQQIAN

SEQ ID NO: 167 - protein, 1239 aa, Artificial Sequence
  POLG
MSRLLWRKVAGATVGPGPVPAPGRWVSSSVPASDPSDGQRRRQQQQQQQQQQQQQPQQPQVLSSEGGQLRHNPLDIQMLSRGLHEQIFGQGGEMPGEAAVRRSVEHLQKHGLWGQPAVPLPDVELRLPPLYGDNLDQHFRLLAQKQSLPYLEAANLLLQAQLPPKPPAWAWAEGWTRYGPEGEAVPVAIPEERALVFDVEVCLAEGTCPTLAVAISPSAWYSWCSQRLVEERYSWTSQLSPADLIPLEVPTGASSPTQRDWQEQLVVGHNVSFDRAHIREQYLIQGSRMRFLDTMSMHMAISGLSSFQRSLWIAAKQGKHKVQPPTKQGQKSQRKARRGPAISSWDWLDISSVNSLAEVHRLYVGGPPLEKEPRELFVKGTMKDIRENFQDLMQYCAQDVWATHEVFQQQLPLFLERCPHPVTLAGMLEMGVSYLPVNQNWERYLAEAQGTYEELQREMKKSLMDLANDACQLLSGERYKEDPWLWDLEWDLQEFKQKKAKKVKKEPATASKLPIEGAGAPGDPMDQEDLGPCSEEEEFQQDVMARACLQKLKGTTELLPKRPQHLPGHPGWYRKLCPRLDDPAWTPGPSLLSLQMRVTPKLMALTWDGFPLHYSERHGWGYLVPGRRDNLAKLPTGTTLESAGVVCPYRAIESLYRKHCLEQGKQQLMPQEAGLAEEFLLTDNSAIWQTVEELDYLEVEAEAKMENLRAAVPGQPLALTARGGPKDTQPSYHHGNGPYNDVDIPGCWFFKLPHKDGNSCNVGSPFAKDFLPKMEDGTLQAGPGGASGPRALEINKMISFWRNAHKRISSQMVVWLPRSALPRAVIRHPDYDEEGLYGAILPQVVTAGTITRRAVEPTWLTASNARPDRVGSELKAMVQAPPGYTLVGADVDSQELWIAAVLGDAHFAGMHGCTAFGWMTLQGRKSRGTDLHSKTATTVGISREHAKIFNYGRIYGAGQPFAERLLMQFNHRLTQQEAAEKAQQMYAATKGLRWYRLSDEGEWLVRELNLPVDRTEGGWISLQDLRKVQRETARKSQWKKWEVVAERAWKGGTESEMFNKLESIATSDIPRTPVLGCCISRALEPSAVQEEFMTSRVNWVVQSSAVDYLHLMLVAMKWLFEEFAIDGRFCISIHDEVRYLVREEDRYRAALALQITNLLTRCMFAYKLGLNDLPQSVAFFSAVDIDRCLRKEVTMDCKTPSNPTGMERRYGIPQGEALDIYQIIELTKGSLEKRSQPGP

SEQ ID NO: 168 - protein, 372 aa, Artificial Sequence
  PPM1K
MSTAALITLVRSGGNQVRRRVLLSSRLLQDDRRVTPTCHSSTSEPRCSRFDPDGSGSPATWDNFGIWDNRIDEPILLPPSIKYGKPIPKISLENVGCASQIGKRKENEDRFDFAQLTDEVLYFAVYDGHGGPAAADFCHTHMEKCIMDLLPKEKNLETLLTLAFLEIDKAFSSHARLSADATLLTSGTTATVALLRDGIELVVASVGDSRAILCRKGKPMKLTIDHTPERKDEKERIKKCGGFVAWNSLGQPHVNGRLAMTRSIGDLDLKTSGVIAEPETKRIKLHHADDSFLVLTTDGINFMVNSQEICDFVNQCHDPNEAAHAVTEQAIQYGTEDNSTAVVVPFGAWGKYKNSEINFSFSRSFASSGRWA

SEQ ID NO: 169 - protein, 654 aa, Artificial Sequence
  SERAC1
MSLAAYCVICCRRIGTSTSPPKSGTHWRDIRNIIKFTGSLILGGSLFLTYEVLALKKAVTLDTQVVEREKMKSYIYVHTVSLDKGENHGIAWQARKELHKAVRKVLATSAKILRNPFADPFSTVDIEDHECAVWLLLRKSKSDDKTTRLEAVREMSETHHWHDYQYRIIAQACDPKTLIGLARSEESDLRFFLLPPPLPSLKEDSSTEEELRQLLASLPQTELDECIQYFTSLALSESSQSLAAQKGGLWCFGGNGLPYAESFGEVPSATVEMFCLEAIVKHSEISTHCDKIEANGGLQLLQRLYRLHKDCPKVQRNIMRVIGNMALNEHLHSSIVRSGWVSIMAEAMKSPHIMESSHAARILANLDRETVQEKYQDGVYVLHPQYRTSQPIKADVLFIHGLMGAAFKTWRQQDSEQAVIEKPMEDEDRYTTCWPKTWLAKDCPALRIISVEYDTSLSDWRARCPMERKSIAFRSNELLRKLRAAGVGDRPVVWISHSMGGLLVKKMLLEASTKPEMSTVINNTRGIIFYSVPHHGSRLAEYSVNIRYLLFPSLEVKELSKDSPALKTLQDDFLEFAKDKNFQVLNFVETLPTYIGSMIKLHVVPVESADLGIGDLIPVDVNHLNICKPKKKDAFLYQRTLQFIREALAKDLEN

SEQ ID NO: 170 - protein, 311 aa, Artificial Sequence
  SLC25A1
MPAPRAPRALAAAAPASGKAKLTHPGKAILAGGLAGGIEICITFPTEYVKTQLQLDERSHPPRYRGIGDCVRQTVRSHGVLGLYRGLSSLLYGSIPKAAVRFGMFEFLSNHMRDAQGRLDSTRGLLCGLGAGVAEAVVVVCPMETIKVKFIHDQTSPNPKYRGFFHGVREIVREQGLKGTYQGLTATVLKQGSNQAIRFFVMTSLRNWYRGDNPNKPMNPLITGVFGAIAGAASVFGNTPLDVIKTRMQGLEAHKYRNTWDCGLQILKKEGLKAFYKGTVPRLGRVCLDVAIVFVIYDEVVKLLNKVWKTD

SEQ ID NO: 171 - protein, 463 aa, Artificial Sequence
  SUCLA2
MAASMFYGRLVAVATLRNHRPRTAQRAAAQVLGSSGLFNNHGLQVQQQQQRNLSLHEYMSMELLQEAGVSVPKGYVAKSPDEAYAIAKKLGSKDVVIKAQVLAGGRGKGTFESGLKGGVKIVFSPEEAKAVSSQMIGKKLFTKQTGEKGRICNQVLVCERKYPRREYYFAITMERSFQGPVLIGSSHGGVNIEDVAAESPEAIIKEPIDIEEGIKKEQALQLAQKMGFPPNIVESAAENMVKLYSLFLKYDATMIEINPMVEDSDGAVLCMDAKINFDSNSAYRQKKIFDLQDWTQEDERDKDAAKANLNYIGLDGNIGCLVNGAGLAMATMDIIKLHGGTPANFLDVGGGATVHQVTEAFKLITSDKKVLAILVNIFGGIMRCDVIAQGIVMAVKDLEIKIPVVVRLQGTRVDDAKALIADSGLKILACDDLDEAARMVVKLSEIVTLAKQAHVDVKFQLPI

SEQ ID NO: 172 - protein, 346 aa, Artificial Sequence
  SUCLG1
MTATLAAAADIATMVSGSSGLAAARLLSRSFLLPQNGIRHCSYTASRQHLYVDKNTKIICQGFTGKQGTFHSQQALEYGTKLVGGTTPGKGGQTHLGLPVFNTVKEAKEQTGATASVIYVPPPFAAAAINEAIEAEIPLVVCITEGIPQQDMVRVKHKLLRQEKTRLIGPNCPGVINPGECKIGIMPGHIHKKGRIGIVSRSGTLTYEAVHQTTQVGLGQSLCVGIGGDPFNGTDFIDCLEIFLNDSATEGIILIGEIGGNAEENAAEFLKQHNSGPNSKPVVSFIAGLTAPPGRRMGHAGAIIAGGKGGAKEKISALQSAGVVVSMSPAQLGTTIYKEFEKRKML

SEQ ID NO: 173 - protein, 292 aa, Artificial Sequence
  TAZ
MPLHVKWPFPAVPPLTWTLASSVVMGLVGTYSCFWTKYMNHLTVHNREVLYELIEKRGPATPLITVSNHQSCMDDPHLWGILKLRHIWNLKLMRWTPAAADICFTKELHSHFFSLGKCVPVCRGAEFFQAENEGKGVLDTGRHMPGAGKRREKGDGVYQKGMDFILEKLNHGDWVHIFPEGKVNMSSEFLRFKWGIGRLIAECHLNPIILPLWHVGMNDVLPNSPPYFPRFGQKITVLIGKPFSALPVLERLRAENKSAVEMRKALTDFIQEEFQHLKTQAEQLHNHLQPGR

SEQ ID NO: 174 - protein, 422 aa, Artificial Sequence
  AGK
MTVFFKTLRNHWKKTTAGLCLLTWGGHWLYGKHCDNLLRRAACQEAQVFGNQLIPPNAQVKKATVFLNPAACKGKARTLFEKNAAPILHLSGMDVTIVKTDYEGQAKKLLELMENTDVIIVAGGDGTLQEVVTGVLRRTDEATFSKIPIGFIPLGETSSLSHTLFAESGNKVQHITDATLAIVKGETVPLDVLQIKGEKEQPVFAMTGLRWGSFRDAGVKVSKYWYLGPLKIKAAHFFSTLKEWPQTHQASISYTGPTERPPNEPEETPVQRPSLYRRILRRLASYWAQPQDALSQEVSPEVWKDVQLSTIELSITTRNNQLDPTSKEDFLNICIEPDTISKGDFITIGSRKVRNPKLHVEGTECLQASQCTLLIPEGAGGSFSIDSEEYEAMPVEVKLLPRKLQFFCDPRKREQMLTSPTQ

SEQ ID NO: 175 - protein, 707 aa, Artificial Sequence
  CLPB
MLGSLVLRRKALAPRLLLRLLRSPTLRGHGGASGRNVTTGSLGEPQWLRVATGGRPGTSPALFSGRGAATGGRQGGRFDTKCLAAATWGRLPGPEETLPGQDSWNGVPSRAGLGMCALAAALVVHCYSKSPSNKDAALLEAARANNMQEVSRLLSEGADVNAKHRLGWTALMVAAINRNNSVVQVLLAAGADPNLGDDFSSVYKTAKEQGIHSLEDGGQDGASRHITNQWTSALEFRRWLGLPAGVLITREDDFNNRLNNRASFKGCTALHYAVLADDYRTVKELLDGGANPLQRNEMGHTPLDYAREGEVMKLLRTSEAKYQEKQRKREAEERRRFPLEQRLKEHIIGQESAIATVGAAIRRKENGWYDEEHPLVFLFLGSSGIGKTELAKQTAKYMHKDAKKGFIRLDMSEFQERHEVAKFIGSPPGYVGHEEGGQLTKKLKQCPNAVVLFDEVDKAHPDVLTIMLQLFDEGRLTDGKGKTIDCKDAIFIMTSNVASDEIAQHALQLRQEALEMSRNRIAENLGDVQISDKITISKNFKENVIRPILKAHFRRDEFLGRINEIVYFLPFCHSELIQLVNKELNFWAKRAKQRHNITLLWDREVADVLVDGYNVHYGARSIKHEVERRVVNQLAAAYEQDLLPGGCTLRITVEDSDKQLLKSPELPSPQAEKRLPKLRLEIIDKDSKTRRLDIRAPLHPEKVCNTI

SEQ ID NO: 176 - protein, 260 aa, Artificial Sequence
  TMEM70
MLFLALGSPWAVELPLCGRRTALCAAAALRGPRASVSRASSSSGPSGPVAGWSTGPSGAARLLRRPGRAQIPVYWEGYVRFLNTPSDKSEDGRLIYTGNMARAVFGVKCFSYSTSLIGLTFLPYIFTQNNAISESVPLPIQIIFYGIMGSFTVITPVLLHFITKGYVIRLYHEATTDTYKAITYNAMLAETSTVFHQNDVKIPDAKHVFTTFYAKTKSLLVNPVLFPNREDYIHLMGYDKEEFILYMEETSEEKRHKDDK

SEQ ID NO: 177 - protein, 795 aa, Artificial Sequence [sequence omitted]

SEQ ID NO: 178 - protein, 439 aa, Artificial Sequence
  OAT
MFSKLAHLQRFAVLSRGVHSSVASATSVATKKTVQGPPTSDDIFEREYKYGAHNYHPLPVALERGKGIYLWDVEGRKYFDFLSSYSAVNQGHCHPKIVNALKSQVDKLTLTSRAFYNNVLGEYEEYITKLFNYHKVLPMNTGVEAGETACKLARKWGYTVKGIQKYKAKIVFAAGNFWGRTLSAISSSTDPTSYDGFGPFMPGFDIIPYNDLPALERALQDPNVAAFMVEPIQGEAGVVVPDPGYLMGVRELCTRHQVLFIADEIQTGLARTGRWLAVDYENVRPDIVLLGKALSGGLYPVSAVLCDDDIMLTIKPGEHGSTYGGNPLGCRVAIAALEVLEEENLAENADKLGIILRNELMKLPSDVVTAVRGKGLLNAIVIKETKDWDAWKVCLRLRDNGLLAKPTHGDIIRFAPPLVIKEDELRESIEIINKTILSF

SEQ ID NO: 179 - protein, 305 aa, Artificial Sequence
  CA5A
MLGRNTWKTSAFSFLVEQMWAPLWSRSMRPGRWCSQRSCAWQTSNNTLHPLWTVPVSVPGGTRQSPINIQWRDSVYDPQLKPLRVSYEAASCLYIWNTGYLFQVEFDDATEASGISGGPLENHYRLKQFHFHWGAVNEGGSEHTVDGHAYPAELHLVHWNSVKYQNYKEAVVGENGLAVIGVFLKLGAHHQTLQRLVDILPEIKHKDARAAMRPFDPSTLLPTCWDYWTYAGSLTTPPLTESVTWIIQKEPVEVAPSQLSAFRTLLFSALGEEEKMMVNNYRPLQPLMNRKVWASFQATNEGTRS

SEQ ID NO: 180 - protein, 558 aa, Artificial Sequence
  GLUD1
MYRYLGEALLLSRAGPAALGSASADSAALLGWARGQPAAAPQPGLALAARRHYSEAVADREDDPNFFKMVEGFFDRGASIVEDKLVEDLRTRESEEQKRNRVRGILRIIKPCNHVLSLSFPIRRDDGSWEVIEGYRAQHSQHRTPCKGGIRYSTDVSVDEVKALASLMTYKCAVVDVPFGGAKAGVKINPKNYTDNELEKITRRFTMELAKKGFIGPGIDVPAPDMSTGEREMSWIADTYASTIGHYDINAHACVTGKPISQGGIHGRISATGRGVFHGIENFINEASYMSILGMTPGFGDKTFVVQGFGNVGLHSMRYLHRFGAKCIAVGESDGSIWNPDGIDPKELEDFKLQHGSILGFPKAKPYEGSILEADCDILIPAASEKQLTKSNAPRVKAKIIAEGANGPTTPEADKIFLERNIMVIPDLYLNAGGVTVSYFEWLKNLNHVSYGRLTFKYERDSNYHLLMSVQESLERKFGKHGGTIPIVPTAEFQDRISGASEKDIVHSGLAYTMERSARQIMRTAMKYNLGLDLRTAAYVNAIEKVFKVYNEAGVTFT

SEQ ID NO: 181 - protein, 373 aa, Artificial Sequence
  GLUL
MTTSASSHLNKGIKQVYMSLPQGEKVQAMYIWIDGTGEGLRCKTRTLDSEPKCVEELPEWNFDGSSTLQSEGSNSDMYLVPAAMFRDPFRKDPNKLVLCEVFKYNRRPAETNLRHTCKRIMDMVSNQHPWFGMEQEYTLMGTDGHPFGWPSNGFPGPQGPYYCGVGADRAYGRDIVEAHYRACLYAGVKIAGTNAEVMPAQWEFQIGPCEGISMGDHLWVARFILHRVCEDFGVIATFDPKPIPGNWNGAGCHTNFSTKAMREENGLKYIEEAIEKLSKRHQYHIRAYDPKGGLDNARRLTGFHETSNINDFSAGVANRSASIRIPRTVGQEKKGYFEDRRPSANCDPFSVTEALIRTCLLNETGDEPFQYKN

SEQ ID NO: 182 - protein, 480 aa, Artificial Sequence
  UMPS
MAVARAALGPLVTGLYDVQAFKFGDFVLKSGLSSPIYIDLRGIVSRPRLLSQVADILFQTAQNAGISFDTVCGVPYTALPLATVICSTNQIPMLIRRKETKDYGTKRLVEGTINPGETCLIIEDVVTSGSSVLETVEVLQKEGLKVTDAIVLLDREQGGKDKLQAHGIRLHSVCTLSKMLEILEQQKKVDAETVGRVKRFIQENVFVAANHNGSPLSIKEAPKELSFGARAELPRIHPVASKLLRLMQKKETNLCLSADVSLARELLQLADALGPSICMLKTHVDILNDFTLDVMKELITLAKCHEFLIFEDRKFADIGNTVKKQYEGGIFKIASWADLVNAHVVPGSGVVKGLQEVGLPLHRGCLLIAEMSSTGSLATGDYTRAAVRMAEEHSEFVVGFISGSRVSMKPEFLHLTPGVQLEAGGDNLGQQYNSPQEVIGKRGSDIIIVGRGIISAADRLEAAEMYRKAAWEAYLSRLGV

SEQ ID NO: 183 - protein, 557 aa, Artificial Sequence
  SLC22A5
MRDYDEVTAFLGEWGPFQRLIFFLLSASIIPNGFTGLSSVFLIATPEHRCRVPDAANLSSAWRNHTVPLRLRDGREVPHSCRRYRLATIANFSALGLEPGRDVDLGQLEQESCLDGWEFSQDVYLSTIVTEWNLVCEDDWKAPLTISLFFVGVLLGSFISGQLSDRFGRKNVLFVTMGMQTGFSFLQIFSKNFEMFVVLFVLVGMGQISNYVAAFVLGTEILGKSVRIIFSTLGVCIFYAFGYMVLPLFAYFIRDWRMLLVALTMPGVLCVALWWFIPESPRWLISQGRFEEAEVIIRKAAKANGIVVPSTIFDPSELQDLSSKKQQSHNILDLLRTWNIRMVTIMSIMLWMTISVGYFGLSLDTPNLHGDIFVNCFLSAMVEVPAYVLAWLLLQYLPRRYSMATALFLGGSVLLFMQLVPPDLYYLATVLVMVGKFGVTAAFSMVYVYTAELYPTVVRNMGVGVSSTASRLGSILSPYFVYLGAYDRFLPYILMGSLTILTAILTLFLPESFGTPLPDTIDQMLRVKGMKHRKTPSHTRMLKDGQERPTILKSTAF

SEQ ID NO: 184 - protein, 773 aa, Artificial Sequence
  CPT1A
MAEAHQAVAFQFTVTPDGIDLRLSHEALRQIYLSGLHSWKKKFIRFKNGIITGVYPASPSSWLIVVVGVMTTMYAKIDPSLGIIAKINRTLETANCMSSQTKNVVSGVLFGTGLWVALIVTMRYSLKVLLSYHGWMFTEHGKMSRATKIWMGMVKIFSGRKPMLYSFQTSLPRLPVPAVKDTVNRYLQSVRPLMKEEDFKRMTALAQDFAVGLGPRLQWYLKLKSWWATNYVSDWWEEYIYLRGRGPLMVNSNYYAMDLLYILPTHIQAARAGNAIHAILLYRRKLDREEIKPIRLLGSTIPLCSAQWERMFNTSRIPGEETDTIQHMRDSKHIVVYHRGRYFKVWLYHDGRLLKPREMEQQMQRILDNTSEPQPGEARLAALTAGDRVPWARCRQAYFGRGKNKQSLDAVEKAAFFVTLDETEEGYRSEDPDTSMDSYAKSLLHGRCYDRWFDKSFTFVVFKNGKMGLNAEHSWADAPIVAHLWEYVMSIDSLQLGYAEDGHCKGDINPNIPYPTRLQWDIPGECQEVIETSLNTANLLANDVDFHSFPFVAFGKGIIKKCRTSPDAFVQLALQLAHYKDMGKFCLTYEASMTRLFREGRTETVRSCTTESCDFVRAMVDPAQTVEQRLKLFKLASEKHQHMYRLAMTGSGIDRHLFCLYVVSKYLAVESPFLKEVLSEPWRLSTSQTPQQQVELFDLENNPEYVSSGGGFGPVADDGYGVSYILVGENLINFHISSKFSCPETDSHRFGRHLKEAMTDIITLFGLSSNSKK

SEQ ID NO: 185 - protein, 763 aa, Artificial Sequence
  HADHA
MVACRAIGILSRFSAFRILRSRGYICRNFTGSSALLTRTHINYGVKGDVAVVRINSPNSKVNTLSKELHSEFSEVMNEIWASDQIRSAVLISSKPGCFIAGADINMLAACKTLQEVTQLSQEAQRIVEKLEKSTKPIVAAINGSCLGGGLEVAISCQYRIATKDRKTVLGTPEVLLGALPGAGGTQRLPKMVGVPAALDMMLTGRSIRADRAKKMGLVDQLVEPLGPGLKPPEERTIEYLEEVAITFAKGLADKKISPKRDKGLVEKLTAYAMTIPFVRQQVYKKVEEKVRKQTKGLYPAPLKIIDVVKTGIEQGSDAGYLCESQKFGELVMTKESKALMGLYHGQVLCKKNKFGAPQKDVKHLAILGAGLMGAGIAQVSVDKGLKTILKDATLTALDRGQQQVFKGLNDKVKKKALTSFERDSIFSNLTGQLDYQGFEKADMVIEAVFEDLSLKHRVLKEVEAVIPDHCIFASNTSALPISEIAAVSKRPEKVIGMHYFSPVDKMQLLEIITTEKTSKDTSASAVAVGLKQGKVIIVVKDGPGFYTTRCLAPMMSEVIRILQEGVDPKKLDSLTTSFGFPVGAATLVDEVGVDVAKHVAEDLGKVFGERFGGGNPELLTQMVSKGFLGRKSGKGFYIYQEGVKRKDLNSDMDSILASLKLPPKSEVSSDEDIQFRLVTRFVNEAVMCLQEGILATPAEGDIGAVFGLGFPPCLGGPFRFVDLYGAQKIVDRLKKYEAAYGKQFTPCQLLADHANSPNKKFYQ

SEQ ID NO: 186 - protein, 314 aa, Artificial Sequence
  HADH
MAFVTRQFMRSVSSSSTASASAKKIIVKHVTVIGGGLMGAGIAQVAAATGHTVVLVDQTEDILAKSKKGIEESLRKVAKKKFAENLKAGDEFVEKTLSTIATSTDAASVVHSTDLVVEAIVENLKVKNELFKRLDKFAAEHTIFASNTSSLQITSIANATTRQDRFAGLHFFNPVPVMKLVEVIKTPMTSQKTFESLVDFSKALGKHPVSCKDTPGFIVNRLLVPYLMEAIRLYERGDASKEDIDTAMKLGAGYPMGPFELLDYVGLDTTKFIVDGWHEMDAENPLHQPSPSLNKLVAENKFGKKTGEGFYKYK

SEQ ID NO: 187 - protein, 448 aa, Artificial Sequence
  SLC52A1
MAAPTLGRLVLTHLLVALFGMGSWAAVNGIWVELPVVVKDLPEGWSLPSYLSVVVALGNLGLLVVTLWRQLAPGKGEQVPIQVVQVLSVVGTALLAPLWHHVAPVAGQLHSVAFLTLALVLAMACCTSNVTFLPFLSHLPPPFLRSFFLGQGLSALLPCVLALVQGVGRLECPPAPTNGTSGPPLDFPERFPASTFFWALTALLVTSAAAFRGLLLLLPSLPSVTTGGSGPELQLGSPGAEEEEKEEEEALPLQEPPSQAAGTIPGPDPEAHQLFSAHGAFLLGLMAFTSAVTNGVLPSVQSFSCLPYGRLAYHLAVVLGSAANPLACFLAMGVLCRSLAGLVGLSLLGMLFGAYLMALAILSPCPPLVGTTAGVVLVVLSWVLCLCVFSYVKVAASSLLHGGGRPALLAAGVAIQVGSLLGAGAMFPPTSIYHVFQSRKDCVDPCGP

SEQ ID NO: 188 - protein, 445 aa, Artificial Sequence
  SLC52A2
MAAPTPARPVLTHLLVALFGMGSWAAVNGIWVELPVVVKELPEGWSLPSYVSVLVALGNLGLLVVTLWRRLAPGKDEQVPIRVVQVLGMVGTALLASLWHHVAPVAGQLHSVAFLALAFVLALACCASNVTFLPFLSHLPPRFLRSFFLGQGLSALLPCVLALVQGVGRLECPPAPINGTPGPPLDFLERFPASTFFWALTALLVASAAAFQGLLLLLPPPPSVPTGELGSGLQVGAPGAEEEVEESSPLQEPPSQAAGTTPGPDPKAYQLLSARSACLLGLLAATNALTNGVLPAVQSFSCLPYGRLAYHLAVVLGSAANPLACFLAMGVLCRSLAGLGGLSLLGVFCGGYLMALAVLSPCPPLVGTSAGVVLVVLSWVLCLGVFSYVKVAASSLLHGGGRPALLAAGVAIQVGSLLGAVAMFPPTSIYHVFHSRKDCADPCDS

SEQ ID NO: 189 - protein, 469 aa, Artificial Sequence
  SLC52A3
MAFLMHLLVCVFGMGSWVTINGLWVELPLLVMELPEGWYLPSYLTVVIQLANIGPLLVTLLHHFRPSCLSEVPIIFTLLGVGTVTCIIFAFLWNMTSWVLDGHHSIAFLVLTFFLALVDCTSSVTFLPFMSRLPTYYLTTFFVGEGLSGLLPALVALAQGSGLTTCVNVTEISDSVPSPVPTRETDIAQGVPRALVSALPGMEAPLSHLESRYLPAHFSPLVFFLLLSIMMACCLVAFFVLQRQPRCWEASVEDLLNDQVTLHSIRPREENDLGPAGTVDSSQGQGYLEEKAAPCCPAHLAFIYTLVAFVNALTNGMLPSVQTYSCLSYGPVAYHLAATLSIVANPLASLVSMFLPNRSLLFLGVLSVLGTCFGGYNMAMAVMSPCPLLQGHWGGEVLIVASWVLFSGCLSYVKVMLGVVLRDLSRSALLWCGAAVQLGSLLGALLMFPLVNVLRLFSSADFCNLHCPA

SEQ ID NO: 190 - protein, 474 aa, Artificial Sequence
  HADHB
MTILTYPFKNLPTASKWALRFSIRPLSCSSQLRAAPAVQTKTKKTLAKPNIRNVVVVDGVRTPFLLSGTSYKDLMPHDLARAALTGLLHRTSVPKEVVDYIIFGTVIQEVKTSNVAREAALGAGFSDKTPAHTVTMACISANQAMTTGVGLIASGQCDVIVAGGVELMSDVPIRHSRKMRKLMLDLNKAKSMGQRLSLISKFRFNFLAPELPAVSEFSTSETMGHSADRLAAAFAVSRLEQDEYALRSHSLAKKAQDEGLLSDVVPFKVPGKDTVTKDNGIRPSSLEQMAKLKPAFIKPYGTVTAANSSFLTDGASAMLIMAEEKALAMGYKPKAYLRDFMYVSQDPKDQLLLGPTYATPKVLEKAGLTMNDIDAFEFHEAFSGQILANFKAMDSDWFAENYMGRKTKVGLPPLEKFNNWGGSLSLGHPFGATGCRLVMAAANRLRKEGGQYGLVAACAAGGQGHAMIVEAYPK

SEQ ID NO: 191 - protein, 703 aa, Artificial Sequence
  GYS2
MLRGRSLSVTSLGGLPQWEVEELPVEELLLFEVAWEVTNKVGGIYTVIQTKAKTTADEWGENYFLIGPYFEHNMKTQVEQCEPVNDAVRRAVDAMNKHGCQVHFGRWLIEGSPYVVLFDIGYSAWNLDRWKGDLWEACSVGIPYHDREANDMLIFGSLTAWFLKEVTDHADGKYVVAQFHEWQAGIGLILSRARKLPIATIFTTHATLLGRYLCAANIDFYNHLDKFNIDKEAGERQIYHRYCMERASVHCAHVFTTVSEITAIEAEHMLKRKPDVVTPNGLNVKKFSAVHEFQNLHAMYKARIQDFVRGHFYGHLDFDLEKTLFLFIAGRYEFSNKGADIFLESLSRLNFLLRMHKSDITVMVFFIMPAKTNNFNVETLKGQAVRKQLWDVAHSVKEKFGKKLYDALLRGEIPDLNDILDRDDLTIMKRAIFSTQRQSLPPVTTHNMIDDSTDPILSTIRRIGLFNNRTDRVKVILHPEFLSSTSPLLPMDYEEFVRGCHLGVFPSYYEPWGYTPAECTVMGIPSVTTNLSGFGCFMQEHVADPTAYGIYIVDRRFRSPDDSCNQLTKFLYGFCKQSRRQRIIQRNRTERLSDLLDWRYLGRYYQHARHLTLSRAFPDKFHVELTSPPTTEGFKYPRPSSVPPSPSGSQASSPQSSDVEDEVEDERYDEEEEAERDRLNIKSPFSLSHVPHGKKKLHGEYKN

SEQ ID NO: 192 - protein, 847 aa, Artificial Sequence
  PYGL
MAKPLTDQEKRRQISIRGIVGVENVAELKKSFNRHLHFTLVKDRNVATTRDYYFALAHTVRDHLVGRWIRTQQHYYDKCPKRVYYLSLEFYMGRTLQNTMINLGLQNACDEAIYQLGLDIEELEEIEEDAGLGNGGLGRLAACFLDSMATLGLAAYGYGIRYEYGIFNQKIRDGWQVEEADDWLRYGNPWEKSRPEFMLPVHFYGKVEHTNTGTKWIDTQVVLALPYDTPVPGYMNNTVNTMRLWSARAPNDFNLRDFNVGDYIQAVLDRNLAENISRVLYPNDNFFEGKELRLKQEYFVVAATLQDIIRRFKASKFGSTRGAGTVFDAFPDQVAIQLNDTHPALAIPELMRIFVDIEKLPWSKAWELTQKTFAYTNHTVLPEALERWPVDLVEKLLPRHLEIIYEINQKHLDRIVALFPKDVDRLRRMSLIEEEGSKRINMAHLCIVGSHAVNGVAKIHSDIVKTKVFKDFSELEPDKFQNKTNGITPRRWLLLCNPGLAELIAEKIGEDYVKDLSQLTKLHSFLGDDVFLRELAKVKQENKLKFSQFLETEYKVKINPSSMFDVQVKRIHEYKRQLLNCLHVITMYNRIKKDPKKLFVPRTVIIGGKAAPGYHMAKMIIKLITSVADVVNNDPMVGSKLKVIFLENYRVSLAEKVIPATDLSEQISTAGTEASGTGNMKFMLNGALTIGTMDGANVEMAEEAGEENLFIFGMRIDDVAALDKKGYEAKEYYEALPELKLVIDQIDNGFFSPKQPDLFKDIINMLFYHDRFKVFADYEAYVKCQDKVSQLYMNPKAWNTMVLKNIAASGKFSSDRTIKEYAQNIWNVEPSDLKISLSNESNKVNGN

SEQ ID NO: 193 - protein, 524 aa, Artificial Sequence
  SLC2A2
MTEDKVTGTLVFTVITAVLGSFQFGYDIGVINAPQQVIISHYRHVLGVPLDDRKAINNYVINSTDELPTISYSMNPKPTPWAEEETVAAAQLITMLWSLSVSSFAVGGMTASFFGGWLGDTLGRIKAMLVANILSLVGALLMGFSKLGPSHILIIAGRSISGLYCGLISGLVPMYIGEIAPTALRGALGTFHQLAIVTGILISQIIGLEFILGNYDLWHILLGLSGVRAILQSLLLFFCPESPRYLYIKLDEEVKAKQSLKRLRGYDDVTKDINEMRKEREEASSEQKVSIIQLFTNSSYRQPILVALMLHVAQQFSGINGIFYYSTSIFQTAGISKPVYATIGVGAVNMVFTAVSVFLVEKAGRRSLFLIGMSGMFVCAIFMSVGLVLLNKFSWMSYVSMIAIFLFVSFFEIGPGPIPWFMVAEFFSQGPRPAALAIAAFSNWTCNFIVALCFQYIADFCGPYVFFLFAGVLLAFTLFTFFKVPETKGKSFEEIAAEFQKKSGSAHRPKAAVEMKFLGATETV

SEQ ID NO: 194 - protein, 464 aa, Artificial Sequence
  ALG1
MAASCLVLLALCLLLPLLLLGGWKRWRRGRAARHVVAVVLGDVGRSPRMQYHALSLAMHGFSVTLLGFCNSKPHDELLQNNRIQIVGLTELQSLAVGPRVFQYGVKVVLQAMYLLWKLMWREPGAYIFLQNPPGLPSIAVCWFVGCLCGSKLVIDWHNYGYSIMGLVHGPNHPLVLLAKWYEKFFGRLSHLNLCVTNAMREDLADNWHIRAVTVYDKPASFFKETPLDLQHRLFMKLGSMHSPFRARSEPEDPVTERSAFTERDAGSGLVTRLRERPALLVSSTSWTEDEDFSILLAALEKFEQLTLDGHNLPSLVCVITGKGPLREYYSRLIHQKHFQHIQVCTPWLEAEDYPLLLGSADLGVCLHTSSSGLDLPMKVVDMFGCCLPVCAVNFKCLHELVKHEENGLVFEDSEELAAQLQMLFSNFPDPAGKLNQFRKNLRESQQLRWDESWVQTVLPLVMDT

SEQ ID NO: 195 - protein, 416 aa, Artificial Sequence
  ALG2
MAEEQGRERDSVPKPSVLFLHPDLGVGGAERLVLDAALALQARGCSVKIWTAHYDPGHCFAESRELPVRCAGDWLPRGLGWGGRGAAVCAYVRMVFLALYVLFLADEEFDVVVCDQVSACIPVFRLARRRKKILFYCHFPDLLLTKRDSFLKRLYRAPIDWIEEYTTGMADCILVNSQFTAAVFKETFKSLSHIDPDVLYPSLNVTSFDSVVPEKLDDLVPKGKKFLLLSINRYERKKNLTLALEALVQLRGRLTSQDWERVHLIVAGGYDERVLENVEHYQELKKMVQQSDLGQYVTFLRSFSDKQKISLLHSCTCVLYTPSNEHFGIVPLEAMYMQCPVIAVNSGGPLESIDHSVTGFLCEPDPVHFSEAIEKFIREPSLKATMGLAGRARVKEKFSPEAFTEQLYRYVTKLLV

SEQ ID NO: 196 - protein, 438 aa, Artificial Sequence
  ALG3
MAAGLRKRGRSGSAAQAEGLCKQWLQRAWQERRLLLREPRYTLLVAACLCLAEVGITFWVIHRVAYTEIDWKAYMAEVEGVINGTYDYTQLQGDTGPLVYPAGFVYIFMGLYYATSRGTDIRMAQNIFAVLYLATLLLVFLIYHQTCKVPPFVFFFMCCASYRVHSIFVLRLFNDPVAMVLLFLSINLLLAQRWGWGCCFFSLAVSVKMNVLLFAPGLLFLLLTQFGFRGALPKLGICAGLQVVLGLPFLLENPSGYLSRSFDLGRQFLFHWTVNWRFLPEALFLHRAFHLALLTAHLTLLLLFALCRWHRTGESILSLLRDPSKRKVPPQPLTPNQIVSTLFTSNFIGICFSRSLHYQFYVWYFHTLPYLLWAMPARWLTHLLRLLVLGLIELSWNTYPSTSCSSAALHICHAVILLQLWLGPQPFPKSTQHSKKAH

SEQ ID NO: 197 - protein, 507 aa, Artificial Sequence
  ALG6
MEKWYLMTVVVLIGLTVRWTVSLNSYSGAGKPPMFGDYEAQRHWQEITFNLPVKQWYFNSSDNNLQYWGLDYPPLTAYHSLLCAYVAKFINPDWIALHTSRGYESQAHKLFMRTTVLIADLLIYIPAVVLYCCCLKEISTKKKIANALCILLYPGLILIDYGHFQYNSVSLGFALWGVLGISCDCDLLGSLAFCLAINYKQMELYHALPFFCFLLGKCFKKGLKGKGFVLLVKLACIVVASFVLCWLPFFTEREQTLQVLRRLFPVDRGLFEDKVANIWCSFNVFLKIKDILPRHIQLIMSFCSTFLSLLPACIKLILQPSSKGFKFTLVSCALSFFLFSFQVHEKSILLVSLPVCLVLSEIPFMSTWFLLVSTFSMLPLLLKDELLMPSVVTTMAFFIACVTSFSIFEKTSEEELQLKSFSISVRKYLPCFTFLSRIIQYLFLISVITMVLLTLMTVTLDPPQKLPDLFSVLVCFVSCLNFLFFLVYFNIIIMWDSKSGRNQKKIS

SEQ ID NO: 198 - protein, 526 aa, Artificial Sequence
  ALG8
MAALTIATGTGNWFSALALGVTLLKCLLIPTYHSTDFEVHRNWLAITHSLPISQWYYEATSEWTLDYPPFFAWFEYILSHVAKYFDQEMLNVHNLNYSSSRTLLFQRFSVIFMDVLFVYAVRECCKCIDGKKVGKELTEKPKFILSVLLLWNFGLLIVDHIHFQYNGFLFGLMLLSIARLFQKRHMEGAFLFAVLLHFKHIYLYVAPAYGVYLLRSYCFTANKPDGSIRWKSFSFVRVISLGLVVFLVSALSLGPFLALNQLPQVFSRLFPFKRGLCHAYWAPNFWALYNALDKVLSVIGLKLKFLDPNNIPKASMTSGLVQQFQHTVLPSVTPLATLICTLIAILPSIFCLWFKPQGPRGFLRCLTLCALSSFMFGWHVHEKAILLAILPMSLLSVGKAGDASIFLILTTTGHYSLFPLLFTAPELPIKILLMLLFTIYSISSLKTLFRKEKPLFNWMETFYLLGLGPLEVCCEFVFPFTSWKVKYPFIPLLLTSVYCAVGITYAWFKLYVSVLIDSAIGKTKKQ

SEQ ID NO: 199 - protein, 611 aa, Artificial Sequence
  ALG9
MASRGARQRLKGSGASSGDTAPAADKLRELLGSREAGGAEHRTELSGNKAGQVWAPEGSTAFKCLLSARLCAALLSNISDCDETFNYWEPTHYLIYGEGFQTWEYSPAYAIRSYAYLLLHAWPAAFHARILQTNKILVFYFLRCLLAFVSCICELYFYKAVCKKFGLHVSRMMLAFLVLSTGMFCSSSAFLPSSFCMYTTLIAMTGWYMDKTSIAVLGVAAGAILGWPFSAALGLPIAFDLLVMKHRWKSFFHWSLMALILFLVPVVVIDSYYYGKLVIAPLNIVLYNVFTPHGPDLYGTEPWYFYLINGFLNFNVAFALALLVLPLTSLMEYLLQRFHVQNLGHPYWLTLAPMYIWFIIFFIQPHKEERFLFPVYPLICLCGAVALSALQKCYHFVFQRYRLEHYTVTSNWLALGTVFLFGLLSFSRSVALFRGYHGPLDLYPEFYRIATDPTIHTVPEGRPVNVCVGKEWYRFPSSFLLPDNWQLQFIPSEFRGQLPKPFAEGPLATRIVPTDMNDQNLEEPSRYIDISKCHYLVDLDTMRETPREPKYSSNKEEWISLAYRPFLDASRSSKLLRAFYVPFLSDQYTVYVNYTILKPRKAKQIRKKSGG

SEQ ID NO: 200 - protein, 492 aa, Artificial Sequence
  ALG11
MAAGERSWCLCKLLRFFYSLFFPGLIVCGTLCVCLVIVLWGIRLLLQRKKKLVSTSKNGKNQMVIAFFHPYCNAGGGGERVLWCALRALQKKYPEAVYVVYTGDVNVNGQQILEGAFRRFNIRLIHPVQFVFLRKRYLVEDSLYPHFTLLGQSLGSIFLGWEALMQCVPDVYIDSMGYAFTLPLFKYIGGCQVGSYVHYPTISTDMLSVVKNQNIGFNNAAFITRNPFLSKVKLIYYYLFAFIYGLVGSCSDVVMVNSSWTLNHILSLWKVGNCTNIVYPPCDVQTFLDIPLHEKKMTPGHLLVSVGQFRPEKNHPLQIRAFAKLLNKKMVESPPSLKLVLIGGCRNKDDELRVNQLRRLSEDLGVQEYVEFKINIPFDELKNYLSEATIGLHTMWNEHFGIGVVECMAAGTIILAHNSGGPKLDIVVPHEGDITGFLAESEEDYAETIAHILSMSAEKRLQIRKSARASVSRFSDQEFEVTFLSSVEKLFK

SEQ ID NO: 201 - protein, 488 aa, Artificial Sequence
  ALG12
MAGKGSSGRRPLLLGLLVAVATVHLVICPYTKVEESFNLQATHDLLYHWQDLEQYDHLEFPGVVPRTFLGPVVIAVFSSPAVYVLSLLEMSKFYSQLIVRGVLGLGVIFGLWTLQKEVRRHFGAMVATMFCWVTAMQFHLMFYCTRTLPNVLALPVVLLALAAWLRHEWARFIWLSAFAIIVFRVELCLFLGLLLLLALGNRKVSVVRALRHAVPAGILCLGLTVAVDSYFWRQLTWPEGKVLWYNTVLNKSSNWGTSPLLWYFYSALPRGLGCSLLFIPLGLVDRRTHAPTVLALGFMALYSLLPHKELRFIIYAFPMLNITAARGCSYLLNNYKKSWLYKAGSLLVIGHLVVNAAYSATALYVSHFNYPGGVAMQRLHQLVPPQTDVLLHIDVAAAQTGVSRFLQVNSAWRYDKREDVQPGTGMLAYTHILMEAAPGLLALYRDTHRVLASVVGTTGVSLNLTQLPPFNVHLQTKLVLLERLPRPS

SEQ ID NO: 202 - protein, 1137 aa, Artificial Sequence
  ALG13
MKCVFVTVGTTSFDDLIACVSAPDSLQKIESLGYNRLILQIGRGTVVPEPFSTESFTLDVYRYKDSLKEDIQKADLVISHAGAGSCLETLEKGKPLVVVINEKLMNNHQLELAKQLHKEGHLFYCTCRVLTCPGQAKSIASAPGKCQDSAALTSTAFSGLDFGLLSGYLHKQALVTATHPTCTLLFPSCHAFFPLPLTPTLYKMHKGWKNYCSQKSLNEASMDEYLGSLGLFRKLTAKDASCLFRAISEQLFCSQVHHLEIRKACVSYMRENQQTFESYVEGSFEKYLERLGDPKESAGQLEIRALSLIYNRDFILYRFPGKPPTYVTDNGYEDKILLCYSSSGHYDSVYSKQFQSSAAVCQAVLYEILYKDVFVVDEEELKTAIKLFRSGSKKNRNNAVTGSEDAHTDYKSSNQNRMEEWGACYNAENIPEGYNKGTEETKSPENPSKMPFPYKVLKALDPEIYRNVEFDVWLDSRKELQKSDYMEYAGRQYYLGDKCQVCLESEGRYYNAHIQEVGNENNSVTVFIEELAEKHVVPLANLKPVTQVMSVPAWNAMPSRKGRGYQKMPGGYVPEIVISEMDIKQQKKMFKKIRGKEVYMTMAYGKGDPLLPPRLQHSMHYGHDPPMHYSQTAGNVMSNEHFHPQHPSPRQGRGYGMPRNSSRFINRHNMPGPKVDFYPGPGKRCCQSYDNFSYRSRSFRRSHRQMSCVNKESQYGFTPGNGQMPRGLEETITFYEVEEGDETAYPTLPNHGGPSTMVPATSGYCVGRRGHSSGKQTLNLEEGNGQSENGRYHEEYLYRAEPDYETSGVYSTTASTANLSLQDRKSCSMSPQDTVTSYNYPQKMMGNIAAVAASCANNVPAPVLSNGAAANQAISTTSVSSQNAIQPLFVSPPTHGRPVIASPSYPCHSAIPHAGASLPPPPPPPPPPPPPPPPPPPPPPPPPPPALDVGETSNLQPPPPLPPPPYSCDPSGSDLPQDTKVLQYYFNLGLQCYYHSYWHSMVYVPQMQQQLHVENYPVYTEPPLVDQTVPQCYSEVRREDGIQAEASANDTFPNADSSSVPHGAVYYPVMSDPYGQPPLPGFDSCLPVVPDYSCVPPWHPVGTAYGGSSQIHGAINPGPIGCIAPSPPASHYVPQGM

SEQ ID NO: 203 - protein, 856 aa, Artificial Sequence
  ATP6V0A2
MGSLFRSETMCLAQLFLQSGTAYECLSALGEKGLVQFRDLNQNVSSFQRKFVGEVKRCEELERILVYLVQEINRADIPLPEGEASPPAPPLKQVLEMQEQLQKLEVELREVTKNKEKLRKNLLELIEYTHMLRVTKTFVKRNVEFEPTYEEFPSLESDSLLDYSCMQRLGAKLGFVSGLINQGKVEAFEKMLWRVCKGYTIVSYAELDESLEDPETGEVIKWYVFLISFWGEQIGHKVKKICDCYHCHVYPYPNTAEERREIQEGLNTRIQDLYTVLHKTEDYLRQVLCKAAESVYSRVIQVKKMKAIYHMLNMCSFDVTNKCLIAEVWCPEADLQDLRRALEEGSRESGATIPSFMNIIPTKETPPTRIRTNKFTEGFQNIVDAYGVGSYREVNPALFTIITFPFLFAVMFGDFGHGFVMFLFALLLVLNENHPRLNQSQEIMRMFFNGRYILLLMGLFSVYTGLIYNDCFSKSVNLFGSGWNVSAMYSSSHPPAEHKKMVLWNDSVVRHNSILQLDPSIPGVFRGPYPLGIDPIWNLATNRLTFLNSFKMKMSVILGIIHMTFGVILGIFNHLHFRKKFNIYLVSIPELLFMLCIFGYLIFMIFYKWLVFSAETSRVAPSILIEFINMFLFPASKTSGLYTGQEYVQRVLLVVTALSVPVLFLGKPLFLLWLHNGRSCFGVNRSGYTLIRKDSEEEVSLLGSQDIEEGNHQVEDGCREMACEEFNFGEILMTQVIHSIEYCLGCISNTASYLRLWALSLAHAQLSDVLWAMLMRVGLRVDTTYGVLLLLPVIALFAVLTIFILLIMEGLSAFLHAIRLHWVEFQNKFYVGAGTKFVPFSFSLLSSKFNNDDSVA

SEQ ID NO: 204 - protein, 498 aa, Artificial Sequence
  B3GLCT
MRPPACWWLLAPPALLALLTCSLAFGLASEDTKKEVKQSQDLEKSGISRKNDIDLKGIVFVIQSQSNSFHAKRAEQLKKSILKQAADLTQELPSVLLLHQLAKQEGAWTILPLLPHFSVTYSRNSSWIFFCEEETRIQIPKLLETLRRYDPSKEWFLGKALHDEEATIIHHYAFSENPTVFKYPDFAAGWALSIPLVNKLTKRLKSESLKSDFTIDLKHEIALYIWDKGGGPPLTPVPEFCTNDVDFYCATTFHSFLPLCRKPVKKKDIFVAVKTCKKFHGDRIPIVKQTWESQASLIEYYSDYTENSIPTVDLGIPNTDRGHCGKTFAILERFLNRSQDKTAWLVIVDDDTLISISRLQHLLSCYDSGEPVFLGERYGYGLGTGGYSYITGGGGMVFSREAVRRLLASKCRCYSNDAPDDMVLGMCFSGLGIPVTHSPLFHQARPVDYPKDYLSHQVPISFHKHWNIDPVKVYFTWLAPSDEDKARQETQKGFREEL

SEQ ID NO: 205 - protein, 376 aa, Artificial Sequence
  CHST14
MFPRPLTPLAAPNGAEPLGRALRRAPLGRARAGLGGPPLLLPSMLMFAVIVASSGLLLMIERGILAEMKPLPLHPPGREGTAWRGKAPKPGGLSLRAGDADLQVRQDVRNRTLRAVCGQPGMPRDPWDLPVGQRRTLLRHILVSDRYRFLYCYVPKVACSNWKRVMKVLAGVLDSVDVRLKMDHRSDLVFLADLRPEEIRYRLQHYFKFLFVREPLERLLSAYRNKFGEIREYQQRYGAEIVRRYRAGAGPSPAGDDVTFPEFLRYLVDEDPERMNEHWMPVYHLCQPCAVHYDFVGSYERLEADANQVLEWVRAPPHVRFPARQAWYRPASPESLHYHLCSAPRALLQDVLPKYILDFSLFAYPLPNVTKEACQQ

SEQ ID NO: 206 - protein, 980 aa, Artificial Sequence
  COG1
MATAATSPALKRLDLRDPAALFETHGAEEIRGLERQVRAEIEHKKEELRQMVGERYRDLIEAADTIGQMRRCAVGLVDAVKATDQYCARLRQAGSAAPRPPRAQQPQQPSQEKFYSMAAQIKLLLEIPEKIWSSMEASQCLHATQLYLLCCHLHSLLQLDSSSSRYSPVLSRFPILIRQVAAASHFRSTILHESKMLLKCQGVSDQAVAEALCSIMLLEESSPRQALTDFLLARKATIQKLLNQPHHGAGIKAQICSLVELLATTLKQAHALFYTLPEGLLPDPALPCGLLFSTLETITGQHPAGKGTGVLQEEMKLCSWFKHLPASIVEFQPTLRTLAHPISQEYLKDTLQKWIHMCNEDIKNGITNLLMYVKSMKGLAGIRDAMWELLTNESTNHSWDVLCRRLLEKPLLFWEDMMQQLFLDRLQTLTKEGFDSISSSSKELLVSALQELESSTSNSPSNKHIHFEYNMSLFLWSESPNDLPSDAAWVSVANRGQFASSGLSMKAQAISPCVQNFCSALDSKLKVKLDDLLAYLPSDDSSLPKDVSPTQAKSSAFDRYADAGTVQEMLRTQSVACIKHIVDCIRAELQSIEEGVQGQQDALNSAKLHSVLFMARLCQSLGELCPHLKQCILGKSESSEKPAREFRALRKQGKVKTQEIIPTQAKWQEVKEVLLQQSVMGYQVWSSAVVKVLIHGFTQSLLLDDAGSVLATATSWDELEIQEEAESGSSVTSKIRLPAQPSWYVQSFLFSLCQEINRVGGHALPKVTLQEMLKSCMVQVVAAYEKLSEEKQIKKEGAFPVTQNRALQLLYDLRYLNIVLTAKGDEVKSGRSKPDSRIEKVTDHLEALIDPFDLDVFTPHLNSNLHRLVQRTSVLFGLVTGTENQLAPRSSTFNSQEPHNILPLASSQIRFGLLPLSMTSTRKAKSTRNIETKAQVVPPARSTAGDPTVPGSLFRQLVSEEDNTSAPSLFKLGWLSSMTK

SEQ ID NO: 207 - protein, 738 aa, Artificial Sequence
  COG2
MEKSRMNLPKGPDTLCFDKDEFMKEDFDVDHFVSDCRKRVQLEELRDDLELYYKLLKTAMVELINKDYADFVNLSTNLVGMDKALNQLSVPLGQLREEVLSLRSSVSEGIRAVDERMSKQEDIRKKKMCVLRLIQVIRSVEKIEKILNSQSSKETSALEASSPLLTGQILERIATEFNQLQFHAVQSKGMPLLDKVRPRIAGITAMLQQSLEGLLLEGLQTSDVDIIRHCLRTYATIDKTRDAEALVGQVLVKPYIDEVIIEQFVESHPNGLQVMYNKLLEFVPHHCRLLREVTGGAISSEKGNTVPGYDFLVNSVWPQIVQGLEEKLPSLFNPGNPDAFHEKYTISMDFVRRLERQCGSQASVKRLRAHPAYHSFNKKWNLPVYFQIRFREIAGSLEAALTDVLEDAPAESPYCLLASHRTWSSLRRCWSDEMFLPLLVHRLWRLTLQILARYSVFVNELSLRPISNESPKEIKKPLVTGSKEPSITQGNTEDQGSGPSETKPVVSISRTQLVYVVADLDKLQEQLPELLEIIKPKLEMIGFKNFSSISAALEDSQSSFSACVPSLSSKIIQDLSDSCFGFLKSALEVPRLYRRTNKEVPTTASSYVDSALKPLFQLQSGHKDKLKQAIIQQWLEGTLSESTHKYYETVSDVLNSVKKMEESLKRLKQARKTTPANPVGPSGGMSDDDKIRLQLALDVEYLGEQIQKLGLQASDIKSFSALAELVAAAKDQATAEQP

SEQ ID NO: 208 - protein, 785 aa, Artificial Sequence
  COG4
MADLDSPPKLSGVQQPSEGVGGGRCSEISAELIRSLTELQELEAVYERLCGEEKVVERELDALLEQQNTIESKMVTLHRMGPNLQLIEGDAKQLAGMITFTCNLAENVSSKVRQLDLAKNRLYQAIQRADDILDLKFCMDGVQTALRSEDYEQAAAHTHRYLCLDKSVIELSRQGKEGSMIDANLKLLQEAEQRLKAIVAEKFAIATKEGDLPQVERFFKIFPLLGLHEEGLRKFSEYLCKQVASKAEENLLMVLGTDMSDRRAAVIFADTLTLLFEGIARIVETHQPIVETYYGPGRLYTLIKYLQVECDRQVEKVVDKFIKQRDYHQQFRHVQNNLMRNSTTEKIEPRELDPILTEVTLMNARSELYLRFLKKRISSDFEVGDSMASEEVKQEHQKCLDKLLNNCLLSCTMQELIGLYVTMEEYFMRETVNKAVALDTYEKGQLTSSMVDDVFYIVKKCIGRALSSSSIDCLCAMINLATTELESDFRDVLCNKLRMGFPATTFQDIQRGVTSAVNIMHSSLQQGKFDTKGIESTDEAKMSFLVTLNNVEVCSENISTLKKTLESDCTKLFSQGIGGEQAQAKFDSCLSDLAAVSNKFRDLLQEGLTELNSTAIKPQVQPWINSFFSVSHNIEEEEFNDYEANDPWVQQFILNLEQQMAEFKASLSPVIYDSLTGLMTSLVAVELEKVVLKSTFNRLGGLQFDKELRSLIAYLTTVTTWTIRDKFARLSQMATILNLERVTEILDYWGPNSGPLTWRLTPAEVRQVLALRIDFRSEDIKRLRL

SEQ ID NO: 209 - protein, 839 aa, Artificial Sequence
  COG5
MGWVGGRRRDSASPPGRSRSAADDINPAPANMEGGGGSVAVAGLGARGSGAAAATVRELLQDGCYSDFLNEDFDVKTYTSQSIHQAVIAEQLAKLAQGISQLDRELHLQVVARHEDLLAQATGIESLEGVLQMMQTRIGALQGAVDRIKAKIVEPYNKIVARTAQLARLQVACDLLRRIIRILNLSKRLQGQLQGGSREITKAAQSLNELDYLSQGIDLSGIEVIENDLLFIARARLEVENQAKRLLEQGLETQNPTQVGTALQVFYNLGTLKDTITSVVDGYCATLEENINSALDIKVLTQPSQSAVRGGPGRSTMPTPGNTAALRASFWTNMEKLMDHIYAVCGQVQHLQKVLAKKRDPVSHICFIEEIVKDGQPEIFYTFWNSVTQALSSQFHMATNSSMFLKQAFEGEYPKLLRLYNDLWKRLQQYSQHIQGNFNASGTTDLYVDLQHMEDDAQDIFIPKKPDYDPEKALKDSLQPYEAAYLSKSLSRLFDPINLVFPPGGRNPPSSDELDGIIKTIASELNVAAVDTNLTLAVSKNVAKTIQLYSVKSEQLLSTQGDASQVIGPLTEGQRRNVAVVNSLYKLHQSVTKAIHALMENAVQPLLTSVGDAIEAIIITMHQEDFSGSLSSSGKPDVPCSLYMKELQGFIARVMSDYFKHFECLDFVFDNTEAIAQRAVELFIRHASLIRPLGEGGKMRLAADFAQMELAVGPFCRRVSDLGKSYRMLRSFRPLLFQASEHVASSPALGDVIPFSIIIQFLFTRAPAELKSPFQRAEWSHTRFSQWLDDHPSEKDRLLLIRGALEAYVQSVRSREGKEFAPVYPIMVQLLQKAMSALQ

SEQ ID NO: 210 - protein, 657 aa, Artificial Sequence
  COG6
MAEGSGEVVAVSATGAANGLNNGAGGTSATTCNPLSRKLHKILETRLDNDKEMLEALKALSTFFVENSLRTRRNLRGDIERKSLAINEEFVSIFKEVKEELESISEDVQAMSNCCQDMTSRLQAAKEQTQDLIVKTTKLQSESQKLEIRAQVADAFLSKFQLTSDEMSLLRGTREGPITEDFFKALGRVKQIHNDVKVLLRTNQQTAGLEIMEQMALLQETAYERLYRWAQSECRTLTQESCDVSPVLTQAMEALQDRPVLYKYTLDEFGTARRSTVVRGFIDALTRGGPGGTPRPIEMHSHDPLRYVGDMLAWLHQATASEKEHLEALLKHVTTQGVEENIQEVVGHITEGVCRPLKVRIEQVIVAEPGAVLLYKISNLLKFYHHTISGIVGNSATALLTTIEEMHLLSKKIFFNSLSLHASKLMDKVELPPPDLGPSSALNQTLMLLREVLASHDSSVVPLDARQADFVQVLSCVLDPLLQMCTVSASNLGTADMATFMVNSLYMMKTTLALFEFTDRRLEMLQFQIEAHLDTLINEQASYVLTRVGLSYIYNTVQQHKPEQGSLANMPNLDSVTLKAAMVQFDRYLSAPDNLLIPQLNFLLSATVKEQIVKQSTELVCRAYGEVYAAVMNPINEYKDPENILHRSPQQVQTLLS

SEQ ID NO: 211 - protein, 770 aa, Artificial Sequence
  COG7
MDFSKFLADDFDVKEWINAAFRAGSKEAASGKADGHAATLVMKLQLFIQEVNHAVEETSHQALQNMPKVLRDVEALKQEASFLKEQMILVKEDIKKFEQDTSQSMQVLVEIDQVKSRMQLAAESLQEADKWSTLSADIEETFKTQDIAVISAKLTGMQNSLMMLVDTPDYSEKCVHLEALKNRLEALASPQIVAAFTSQAVDQSKVFVKVFTEIDRMPQLLAYYYKCHKVQLLAAWQELCQSDLSLDRQLTGLYDALLGAWHTQIQWATQVFQKPHEVVMVLLIQTLGALMPSLPSCLSNGVERAGPEQELTRLLEFYDATAHFAKGLEMALLPHLHEHNLVKVTELVDAVYDPYKPYQLKYGDMEESNLLIQMSAVPLEHGEVIDCVQELSHSVNKLFGLASAAVDRCVRFTNGLGTCGLLSALKSLFAKYVSDFTSTLQSIRKKCKLDHIPPNSLFQEDWTAFQNSIRIIATCGELLRHCGDFEQQLANRILSTAGKYLSDSCSPRSLAGFQESILTDKKNSAKNPWQEYNYLQKDNPAEYASLMEILYTLKEKGSSNHNLLAAPRAALTRLNQQAHQLAFDSVFLRIKQQLLLISKMDSWNTAGIGETLTDELPAFSLTPLEYISNIGQYIMSLPLNLEPFVTQEDSALELALHAGKLPFPPEQGDELPELDNMADNWLGSIARATMQTYCDAILQIPELSPHSAKQLATDIDYLINVMDALGLQPSRTLQHIVTLLKTRPEDYRQVSKGLPRRLATTVATMRSVNY

SEQ ID NO: 212 - protein, 612 aa, Artificial Sequence
  COG8
MATAATIPSVATATAAALGEVEDEGLLASLFRDRFPEAQWRERPDVGRYLRELSGSGLERLRREPERLAEERAQLLQQTRDLAFANYKTFIRGAECTERIHRLFGDVEASLGRLLDRLPSFQQSCRNFVKEAEEISSNRRMNSLTLNRHTEILEILEIPQLMDTCVRNSYYEEALELAAYVRRLERKYSSIPVIQGIVNEVRQSMQLMLSQLIQQLRTNIQLPACLRVIGYLRRMDVFTEAELRVKFLQARDAWLRSILTAIPNDDPYFHITKTIEASRVHLFDIITQYRAIFSDEDPLLPPAMGEHTVNESAIFHGWVLQKVSQFLQVLETDLYRGIGGHLDSLLGQCMYFGLSFSRVGADFRGQLAPVFQRVAISTFQKAIQETVEKFQEEMNSYMLISAPAILGTSNMPAAVPATQPGTLQPPMVLLDFPPLACFLNNILVAFNDLRLCCPVALAQDVTGALEDALAKVTKIILAFHRAEEAAFSSGEQELFVQFCTVFLEDLVPYLNRCLQVLFPPAQIAQTLGIPPTQLSKYGNLGHVNIGAIQEPLAFILPKRETLFTLDDQALGPELTAPAPEPPAEEPRLEPAGPACPEGGRAETQAEPPSVGP

SEQ ID NO: 213 - protein, 478 aa, Artificial Sequence
  DOLK
DRLLQQGSAVFQFRMSANSGLLPASMVMPLLGLVMKERCQTAGNPFFERFGIVVAATGMAVALFSSVLALGITRPVPTNTCVILGLAGGVIIYIMKHSLSVGEVIEVLEVLLIFVYLNMILLYLLPRCFTPGEALLVLGGISFVLNQLIKRSLTLVESQGDPVDFFLLVVVVGMVLMGIFFSTLFVFMDSGTWASSIFFHLMTCVLSLGVVLPWLHRLIRRNPLLWLLQFLFQTDTRIYLLAYWSLLATLACLVVLYQNAKRSSSESKKHQAPTIARKYFHLIVVATYIPGIIFDRPLLYVAATVCLAVFIFLEYVRYFRIKPLGHTLRSFLSLFLDERDSGPLILTHIYLLLGMSLPIWLIPRPCTQKGSLGGARALVPYAGVLAVGVGDTVASIFGSTMGEIRWPGTKKTFEGTMTSIFAQIISVALILIFDSGVDLNYSYAWILGSISTVSLLEAYTTQIDNLLLPLYLLILLMA

SEQ ID NO: 214 - protein, 333 aa, Artificial Sequence
  DHDDS
MSWIKEGELSLWERFCANIIKAGPMPKHIAFIMDGNRRYAKKCQVERQEGHSQGFNKLAETLRWCLNLGILEVTVYAFSIENFKRSKSEVDGLMDLARQKFSRLMEEKEKLQKHGVCIRVLGDLHLLPLDLQELIAQAVQATKNYNKCFLNVCFAYTSRHEISNAVREMAWGVEQGLLDPSDISESLLDKCLYTNRSPHPDILIRTSGEVRLSDFLLWQTSHSCLVFQPVLWPEYTFWNLFEAILQFQMNHSVLQKARDMYAEERKRQQLERDQATVTEQLLREGLQASGDAQLRRTRLHKLSARREERVQGFLQALELKRADWLARLGTASA

SEQ ID NO: 215 - protein, 408 aa, Artificial Sequence
  DPAGT1
MWAFSELPMPLLINLIVSLLGFVATVTLIPAFRGHFIAARLCGQDLNKTSRQQIPESQGVISGAVFLIILFCFIPFPFLNCFVKEQCKAFPHHEFVALIGALLAICCMIFLGFADDVLNLRWRHKLLLPTAASLPLLMVYFTNFGNTTIVVPKPFRPILGLHLDLGILYYVYMGLLAVFCTNAINILAGINGLEAGQSLVISASIIVFNLVELEGDCRDDHVFSLYFMIPFFFTTLGLLYHNWYPSRVFVGDTFCYFAGMTFAVVGILGHFSKTMLLFFMPQVFNFLYSLPQLLHIIPCPRHRIPRLNIKTGKLEMSYSKFKTKSLSFLGTFILKVAESLQLVTVHQSETEDGEFTECNNMTLINLLLKVLGPIHERNLTLLLLLLQILGSAITFSIRYQLVRLFYDV

SEQ ID NO: 216 - protein, 260 aa, Artificial Sequence
  DPM1
MASLEVSRSPRRSRRELEVRSPRQNKYSVLLPTYNERENLPLIVWLLVKSFSESGINYEIIIIDDGSPDGTRDVAEQLEKIYGSDRILLRPREKKLGLGTAYIHGMKHATGNYIIIMDADLSHHPKFIPEFIRKQKEGNFDIVSGTRYKGNGGVYGWDLKRKIISRGANFLTQILLRPGASDLTGSFRLYRKEVLEKLIEKCVSKGYVFQMEMIVRARQLNYTIGEVPISFVDRVYGESKLGGNEIVSFLKGLLTLFATT

SEQ ID NO: 217 - protein, 84 aa, Artificial Sequence
  DPM2
MATGTDQVVGLGLVAVSLIIFTYYTAWVILLPFIDSQHVIHKYFLPRAYAVAIPLAAGLLLLLFVGLFISYVMLKTKRVTKKAQ

SEQ ID NO: 218 - protein, 92 aa, Artificial Sequence
  DPM3
MTKLAQWLWGLAILGSTWVALTTGALGLELPLSCQEVLWPLPAYLLVSAGCYALGTVGYRVATFHDCEDAARELQSQIQEARADLARRGLRF

SEQ ID NO: 219 - protein, 346 aa, Artificial Sequence
  G6PC3
MESTLGAGIVIAEALQNQLAWLENVWLWITFLGDPKILFLFYFPAAYYASRRVGIAVLWISLITEWLNLIFKWFLFGDRPFWWVHESGYYSQAPAQVHQFPSSCETGPGSPSGHCMITGAALWPIMTALSSQVATRARSRWVRVMPSLAYCTFLLAVGLSRIFILAHFPHQVLAGLITGAVLGWLMTPRVPMERELSFYGLTALALMLGTSLIYWTLFTLGLDLSWSISLAFKWCERPEWIHVDSRPFASLSRDSGAALGLGIALHSPCYAQVRRAQLGNGQKIACLVLAMGLLGPLDWLGHPPQISLFYIFNFLKYTLWPCLVLALVPWAVHMFSAQEAPPIHSS

SEQ ID NO: 220 - protein, 699 aa, Artificial Sequence
  GFPT1
MCGIFAYLNYHVPRTRREILETLIKGLQRLEYRGYDSAGVGFDGGNDKDWEANACKIQLIKKKGKVKALDEEVHKQQDMDLDIEFDVHLGIAHTRWATHGEPSPVNSHPQRSDKNNEFIVIHNGIITNYKDLKKFLESKGYDFESETDTETIAKLVKYMYDNRESQDTSFTTLVERVIQQLEGAFALVFKSVHFPGQAVGTRRGSPLLIGVRSEHKLSTDHIPILYRTARTQIGSKFTRWGSQGERGKDKKGSCNLSRVDSTTCLFPVEEKAVEYYFASDASAVIEHTNRVIFLEDDDVAAVVDGRLSIHRIKRTAGDHPGRAVQTLQMELQQIMKGNFSSFMQKEIFEQPESVVNTMRGRVNFDDYTVNLGGLKDHIKEIQRCRRLILIACGTSYHAGVATRQVLEELTELPVMVELASDFLDRNTPVFRDDVCFFLSQSGETADTLMGLRYCKERGALTVGITNTVGSSISRETDCGVHINAGPEIGVASTKAYTSQFVSLVMFALMMCDDRISMQERRKEIMLGLKRLPDLIKEVLSMDDEIQKLATELYHQKSVLIMGRGYHYATCLEGALKIKEITYMHSEGILAGELKHGPLALVDKLMPVIMIIMRDHTYAKCQNALQQVVARQGRPVVICDKEDTETIKNTKRTIKVPHSVDCLQGILSVIPLQLLAFHLAVLRGYDVDFPRNLAKSVTVE

SEQ ID NO: 221 - protein, 420 aa, Artificial Sequence
  GMPPA
MLKAVILIGGPQKGTRFRPLSFEVPKPLFPVAGVPMIQHHIEACAQVPGMQEILLIGFYQPDEPLTQFLEAAQQEFNLPVRYLQEFAPLGTGGGLYHFRDQILAGSPEAFFVLNADVCSDFPLSAMLEAHRRQRHPFLLLGTTANRTQSLNYGCIVENPQTHEVLHYVEKPSTFISDIINCGIYLFSPEALKPLRDVFQRNQQDGQLEDSPGLWPGAGTIRLEQDVFSALAGQGQIYVHLTDGIWSQIKSAGSALYASRLYLSRYQDTHPERLAKHTPGGPWIRGNVYIHPTAKVAPSAVLGPNVSIGKGVTVGEGVRLRESIVLHGATLQEHTCVLHSIVGWGSTVGRWARVEGTPSDPNPNDPRARMDSESLFKDGKLLPAITILGCRVRIPAEVLILNSIVLPHKELSRSFTNQIIL

SEQ ID NO: 222 - protein, 360 aa, Artificial Sequence
  GMPPB
MKALILVGGYGTRLRPLTLSTPKPLVDFCNKPILLHQVEALAAAGVDHVILAVSYMSQVLEKEMKAQEQRLGIRISMSHEEEPLGTAGPLALARDLLSETADPFFVLNSDVICDFPFQAMVQFHRHHGQEGSILVTKVEEPSKYGVVVCEADTGRIHRFVEKPQVFVSNKINAGMYILSPAVLQRIQLQPTSIEKEVFPIMAKEGQLYAMELQGFWMDIGQPKDFLTGMCLFLQSLRQKQPERLCSGPGIVGNVLVDPSARIGQNCSIGPNVSLGPGVVVEDGVCIRRCTVLRDARIRSHSWLESCIVGWRCRVGQWVRMENVTVLGEDVIVNDELYLNGASVLPHKSIGESVPEPRIIM

SEQ ID NO: 223 - protein, 335 aa, Artificial Sequence
  MAGT1
MAARWRFWCVSVTMVVALLIVCDVPSASAQRKKEMVLSEKVSQLMEWTNKRPVIRMNGDKFRRLVKAPPRNYSVIVMFTALQLHRQCVVCKQADEEFQILANSWRYSSAFTNRIFFAMVDFDEGSDVFQMLNMNSAPTFINFPAKGKPKRGDTYELQVRGFSAEQIARWIADRTDVNIRVIRPPNYAGPLMLGLLLAVIGGLVYLRRSNMEFLFNKTGWAFAALCFVLAMTSGQMWNHIRGPPYAHKNPHTGHVNYIHGSSQAQFVAETHIVLLFNGGVTLGMVLLCEAATSDMDIGKRKIMCVAGIGLVVLFFSWMLSIFRSKYHGYPYSFLMS

SEQ ID NO: 224 - protein, 699 aa, Artificial Sequence
  MAN1B1
MAACEGRRSGALGSSQSDFLTPPVGGAPWAVATTVVMYPPPPPPPHRDFISVTLSFGENYDNSKSWRRRSCWRKWKQLSRLQRNMILFLLAFLLFCGLLFYINLADHWKALAFRLEEEQKMRPEIAGLKPANPPVLPAPQKADTDPENLPEISSQKTQRHIQRGPPHLQIRPPSQDLKDGTQEEATKRQEAPVDPRPEGDPQRTVISWRGAVIEPEQGTELPSRRAEVPTKPPLPPARTQGTPVHLNYRQKGVIDVFLHAWKGYRKFAWGHDELKPVSRSFSEWFGLGLTLIDALDTMWILGLRKEFEEARKWVSKKLHFEKDVDVNLFESTIRILGGLLSAYHLSGDSLFLRKAEDFGNRLMPAFRTPSKIPYSDVNIGTGVAHPPRWTSDSTVAEVTSIQLEFRELSRLTGDKKFQEAVEKVTQHIHGLSGKKDGLVPMFINTHSGLFTHLGVFTLGARADSYYEYLLKQWIQGGKQETQLLEDYVEAIEGVRTHLLRHSEPSKLTFVGELAHGRFSAKMDHLVCFLPGTLALGVYHGLPASHMELAQELMETCYQMNRQMETGLSPEIVHFNLYPQPGRRDVEVKPADRHNLLRPETVESLFYLYRVTGDRKYQDWGWEILQSFSRFTRVPSGGYSSINNVQDPQKPEPRDKMESFFLGETLKYLFLLFSDDPNLLSLDAYVFNTEAHPLPIWTPA

SEQ ID NO: 225 - protein, 447 aa, Artificial Sequence
  MGAT2
MRFRIYKRKVLILTLVVAACGFVLWSSNGRQRKNEALAPPLLDAEPARGAGGRGGDHPSVAVGIRRVSNVSAASLVPAVPQPEADNLTLRYRSLVYQLNFDQTLRNVDKAGTWAPRELVLVVQVHNRPEYLRLLLDSLRKAQGIDNVLVIFSHDFWSTEINQLIAGVNFCPVLQVFFPFSIQLYPNEFPGSDPRDCPRDLPKNAALKLGCINAEYPDSFGHYREAKFSQTKHHWWWKLHFVWERVKILRDYAGLILFLEEDHYLAPDFYHVFKKMWKLKQQECPECDVLSLGTYSASRSFYGMADKVDVKTWKSTEHNMGLALTRNAYQKLIECTDTFCTYDDYNWDWTLQYLTVSCLPKFWKVLVPQIPRIFHAGDCGMHHKKTCRPSTQSAQIESLLNNNKQYMFPETLTISEKFTVVAISPPRKNGGWGDIRDHELCKSYRRLQ

SEQ ID NO: 226 - protein, 837 aa, Artificial Sequence
  MOGS
MARGERRRRAVPAEGVRTAERAARGGPGRRDGRGGGPRSTAGGVALAVVVLSLALGMSGRWVLAWYRARRAVTLHSAPPVLPADSSSPAVAPDLFWGTYRPHVYFGMKTRSPKPLLTGLMWAQQGTTPGTPKLRHTCEQGDGVGPYGWEFHDGLSFGRQHIQDGALRLTTEFVKRPGGQHGGDWSWRVTVEPQDSGTSALPLVSLFFYVVTDGKEVLLPEVGAKGQLKFISGHTSELGDFRFTLLPPTSPGDTAPKYGSYNVFWTSNPGLPLLTEMVKSRLNSWFQHRPPGAPPERYLGLPGSLKWEDRGPSGQGQGQFLIQQVTLKIPISIEFVFESGSAQAGGNQALPRLAGSLLTQALESHAEGFRERFEKTFQLKEKGLSSGEQVLGQAALSGLLGGIGYFYGQGLVLPDIGVEGSEQKVDPALFPPVPLFTAVPSRSFFPRGFLWDEGFHQLVVQRWDPSLTREALGHWLGLLNADGWIGREQILGDEARARVPPEFLVQRAVHANPPTLLLPVAHMLEVGDPDDLAFLRKALPRLHAWFSWLHQSQAGPLPLSYRWRGRDPALPTLLNPKTLPSGLDDYPRASHPSVTERHLDLRCWVALGARVLTRLAEHLGEAEVAAELGPLAASLEAAESLDELHWAPELGVFADFGNHTKAVQLKPRPPQGLVRVVGRPQPQLQYVDALGYVSLFPLLLRLLDPTSSRLGPLLDILADSRHLWSPFGLRSLAASSSFYGQRNSEHDPPYWRGAVWLNVNYLALGALHHYGHLEGPHQARAAKLHGELRANVVGNVWRQYQATGFLWEQYSDRDGRGMGCRPFHGWTSLVLLAMAEDY

SEQ ID NO: 227 - protein, 247 aa, Artificial Sequence
  MPDU1
MAAEADGPLKRLLVPILLPEKCYDQLFVQWDLLHVPCLKILLSKGLGLGIVAGSLLVKLPQVFKILGAKSAEGLSLQSVMLELVALTGTMVYSITNNFPFSSWGEALFLMLQTITICFLVMHYRGQTVKGVAFLACYGLVLLVLLSPLTPLTVVTLLQASNVPAVVVGRLLQAATNYHNGHTGQLSAITVFLLFGGSLARIFTSIQETGDPLMAGTFVVSSLCNGLIAAQLLFYWNAKPPHKQKKAQ

SEQ ID NO: 228 - protein, 423 aa, Artificial Sequence
  MPI
MAAPRVFPLSCAVQQYAWGKMGSNSEVARLLASSDPLAQIAEDKPYAELWMGTHPRGDAKILDNRISQKTLSQWIAENQDSLGSKVKDTFNGNLPFLFKVLSVETPLSIQAHPNKELAEKLHLQAPQHYPDANHKPEMAIALTPFQGLCGFRPVEEIVTFLKKVPEFQFLIGDEAATHLKQTMSHDSQAVASSLQSCFSHLMKSEKKVVVEQLNLLVKRISQQAAAGNNMEDIFGELLLQLHQQYPGDIGCFAIYFLNLLTLKPGEAMFLEANVPHAYLKGDCVECMACSDNTVRAGLTPKFIDVPTLCEMLSYTPSSSKDRLFLPTRSQEDPYLSIYDPPVPDFTIMKTEVPGSVTEYKVLALDSASILLMVQGTVIASTPTTQTPIPLQRGGVLFIGANESVSLKLTEPKDLLIFRACCLL

SEQ ID NO: 229 - protein, 654 aa, Artificial Sequence [sequence omitted]

SEQ ID NO: 230 - protein, 562 aa, Artificial Sequence
  PGM1
MVKIVTVKTQAYQDQKPGTSGLRKRVKVFQSSANYAENFIQSIISTVEPAQRQEATLVVGGDGRFYMKEAIQLIARIAAANGIGRLVIGQNGILSTPAVSCIIRKIKAIGGIILTASHNPGGPNGDFGIKFNISNGGPAPEAITDKIFQISKTIEEYAVCPDLKVDLGVLGKQQFDLENKFKPFTVEIVDSVEAYATMLRSIFDFSALKELLSGPNRLKIRIDAMHGVVGPYVKKILCEELGAPANSAVNCVPLEDFGGHHPDPNLTYAADLVETMKSGEHDFGAAFDGDGDRNMILGKHGFFVNPSDSVAVIAANIFSIPYFQQTGVRGFARSMPTSGALDRVASATKIALYETPTGWKFFGNLMDASKLSLCGEESFGTGSDHIREKDGLWAVLAWLSILATRKQSVEDILKDHWQKYGRNFFTRYDYEEVEAEGANKMMKDLEALMFDRSFVGKQFSANDKVYTVEKADNFEYSDPVDGSISRNQGLRLIFTDGSRIVFRLSGTGSAGATIRLYIDSYEKDVAKINQDPQVMLAPLISIALKVSQLQERTGRTAPTVIT

SEQ ID NO: 231 - protein, 542 aa, Artificial Sequence
  PGM3
MDLGAITKYSALHAKPNGLILQYGTAGFRTKAEHLDHVMFRMGLLAVLRSKQTKSTIGVMVTASHNPEEDNGVKLVDPLGEMLAPSWEEHATCLANAEEQDMQRVLIDISEKEAVNLQQDAFVVIGRDTRPSSEKLSQSVIDGVTVLGGQFHDYGLLTTPQLHYMVYCRNTGGRYGKATIEGYYQKLSKAFVELTKQASCSGDEYRSLKVDCANGIGALKLREMEHYFSQGLSVQLFNDGSKGKLNHLCGADFVKSHQKPPQGMEIKSNERCCSFDGDADRIVYYYHDADGHFHLIDGDKIATLISSFLKELLVEIGESLNIGVVQTAYANGSSTRYLEEVMKVPVYCTKTGVKHLHHKAQEFDIGVYFEANGHGTALFSTAVEMKIKQSAEQLEDKKRKAAKMLENIIDLFNQAAGDAISDMLVIEAILALKGLTVQQWDALYTDLPNRQLKVQVADRRVISTTDAERQAVTPPGLQEAINDLVKKYKLSRAFVRPSGTEDVVRVYAEADSQESADHLAHEVSLAVFQLAGGIGERPQPGF

SEQ ID NO: 232 - protein, 541 aa, Artificial Sequence
  RFT1
MGSQEVLGHAARLASSGLLLQVLFRLITFVLNAFILRFLSKEIVGVVNVRLTLLYSTTLFLAREAFRRACLSGGTQRDWSQTLNLLWLTVPLGVFWSLFLGWIWLQLLEVPDPNVVPHYATGVVLFGLSAVVELLGEPFWVLAQAHMFVKLKVIAESLSVILKSVLTAFLVLWLPHWGLYIFSLAQLFYTTVLVLCYVIYFTKLLGSPESTKLQTLPVSRITDLLPNITRNGAFINWKEAKLTWSFFKQSFLKQILTEGERYVMTFLNVLNFGDQGVYDIVNNLGSLVARLIFQPIEESFYIFFAKVLERGKDATLQKQEDVAVAAAVLESLLKLALLAGLTITVFGFAYSQLALDIYGGTMLSSGSGPVLLRSYCLYVLLLAINGVTECFTFAAMSKEEVDRYNFVMLALSSSFLVLSYLLTRWCGSVGFILANCFNMGIRITQSLCFIHRYYRRSPHRPLAGLHLSPVLLGTFALSGGVTAVSEVFLCCEQGWPARLAHIAVGAFCLGATLGTAFLTETKLIHFLRTQLGVPRRTDKMT

SEQ ID NO: 233 - protein, 767 aa, Artificial Sequence
  SEC23B
MATYLEFIQQNEERDGVRFSWNVWPSSRLEATRMVVPLACLLTPLKERPDLPPVQYEPVLCSRPTCKAVLNPLCQVDYRAKLWACNFCFQRNQFPPAYGGISEVNQPAELMPQFSTIEYVIQRGAQSPLIFLYVVDTCLEEDDLQALKESLQMSLSLLPPDALVGLITFGRMVQVHELSCEGISKSYVFRGTKDLTAKQIQDMLGLTKPAMPMQQARPAQPQEHPFASSRFLQPVHKIDMNLTDLLGELQRDPWPVTQGKRPLRSTGVALSIAVGLLEGTFPNTGARIMLFTGGPPTQGPGMVVGDELKIPIRSWHDIEKDNARFMKKATKHYEMLANRTAANGHCIDIYACALDQTGLLEMKCCANLTGGYMVMGDSFNTSLFKQTFQRIFTKDFNGDFRMAFGATLDVKTSRELKIAGAIGPCVSLNVKGPCVSENELGVGGTSQWKICGLDPTSTLGIYFEVVNQHNTPIPQGGRGAIQFVTHYQHSSTQRRIRVTTIARNWADVQSQLRHIEAAFDQEAAAVLMARLGVFRAESEEGPDVLRWLDRQLIRLCQKFGQYNKEDPTSFRLSDSFSLYPQFMFHLRRSPFLQVFNNSPDESSYYRHHFARQDLTQSLIMIQPILYSYSFHGPPEPVLLDSSSILADRILLMDTFFQIVIYLGETIAQWRKAGYQDMPEYENFKHLLQAPLDDAQEILQARFPMPRYINTEHGGSQARFLLSKVNPSQTHNNLYAWGQETGAPILTDDVSLQVFMDHLKKLAVSSAC

SEQ ID NO: 234 - protein, 337 aa, Artificial Sequence
  SLC35A1
MAAPRDNVTLLFKLYCLAVMTLMAAVYTIALRYTRTSDKELYFSTTAVCITEVIKLLLSVGILAKETGSLGRFKASLRENVLGSPKELLKLSVPSLVYAVQNNMAFLALSNLDAAVYQVTYQLKIPCTALCTVLMLNRTLSKLQWVSVFMLCAGVTLVQWKPAQATKVVVEQNPLLGFGAIAIAVLCSGFAGVYFEKVLKSSDTSLWVRNIQMYLSGIIVTLAGVYLSDGAEIKEKGFFYGYTYYVWFVIFLASVGGLYTSVVVKYTDNIMKGFSAAAAIVLSTIASVMLFGLQITLTFALGTLLVCVSIYLYGLPRQDTTSIQQGETASKERVIGV

SEQ ID NO: 235 - protein, 396 aa, Artificial Sequence
  SLC35A2
MAAVGAGGSTAAPGPGAVSAGALEPGTASAAHRRLKYISLAVLVVQNASLILSIRYARTLPGDRFFATTAVVMAEVLKGLTCLLLLFAQKRGNVKHLVLFLHEAVLVQYVDTLKLAVPSLIYTLQNNLQYVAISNLPAATFQVTYQLKILTTALFSVLMLNRSLSRLQWASLLLLFTGVAIVQAQQAGGGGPRPLDQNPGAGLAAVVASCLSSGFAGVYFEKILKGSSGSVWLRNLQLGLFGTALGLVGLWWAEGTAVATRGFFFGYTPAVWGVVLNQAFGGLLVAVVVKYADNILKGFATSLSIVLSTVASIRLFGFHVDPLFALGAGLVIGAVYLYSLPRGAAKAIASASASASGPCVHQQPPGQPPPPQLSSHRGDLITEPFLPKLLTKVKGS

SEQ ID NO: 236 - protein, 364 aa, Artificial Sequence
  SLC35C1
MNRAPLKRSRILHMALTGASDPSAEAEANGEKPFLLRALQIALVVSLYWVTSISMVFLNKYLLDSPSLRLDTPIFVTFYQCLVTTLLCKGLSALAACCPGAVDFPSLRLDLRVARSVLPLSVVFIGMITFNNLCLKYVGVAFYNVGRSLTTVFNVLLSYLLLKQTTSFYALLTCGIIIGGFWLGVDQEGAEGTLSWLGTVFGVLASLCVSLNAIYTTKVLPAVDGSIWRLTFYNNVNACILFLPLLLLLGELQALRDFAQLGSAHFWGMMTLGGLFGFAIGYVTGLQIKFTSPLTHNVSGTAKACAQTVLAVLYYEETKSFLWWTSNMMVLGGSSAYTWVRGWEMKKTPEEPSPKDSEKSAMGV

SEQ ID NO: 237 - protein, 173 aa, Artificial Sequence
  SSR4
MAAMASLGALALLLLSSLSRCSAEACLEPQITPSYYTTSDAVISTETVFIVEISLTCKNRVQNMALYADVGGKQFPVTRGQDVGRYQVSWSLDHKSAHAGTYEVRFFDEESYSLLRKAQRNNEDISIIPPLFTVSVDHRGTWNGPWVSTEVLAAAIGLVIYYLAFSAKSHIQA

SEQ ID NO: 238 - protein, 318 aa, Artificial Sequence
  SRD5A3
MAPWAEAEHSALNPLRAVWLTLTAAFLLTLLLQLLPPGLLPGCAIFQDLIRYGKTKCGEPSRPAACRAFDVPKRYFSHFYIISVLWNGFLLWCLTQSLFLGAPFPSWLHGLLRILGAAQFQGGELALSAFLVLVFLWLHSLRRLFECLYVSVFSNVMIHVVQYCFGLVYYVLVGLTVLSQVPMDGRNAYITGKNLLMQARWFHILGMMMFIWSSAHQYKCHVILGNLRKNKAGVVIHCNHRIPFGDWFEYVSSPNYLAELMIYVSMAVTFGFHNLTWWLVVTNVFFNQALSAFLSHQFYKSKFVSYPKHRKAFLPFLF

SEQ ID NO: 239 - protein, 324 aa, Artificial Sequence
  TMEM165
MAAAAPGNGRASAPRLLLLFLVPLLWAPAAVRAGPDEDLSHRNKEPPAPAQQLQPQPVAVQGPEPARVEKIFTPAAPVHTNKEDPATQTNLGFIHAFVAAISVIIVSELGDKTFFIAAIMAMRYNRLTVLAGAMLALGLMTCLSVLFGYATTVIPRVYTYYVSTVLFAIFGIRMLREGLKMSPDEGQEELEEVQAELKKKDEEFQRTKLLNGPGDVETGTSITVPQKKWLHFISPIFVQALTLTFLAEWGDRSQLTTIVLAAREDPYGVAVGGTVGHCLCTGLAVIGGRMIAQKISVRTVTIIGGIVFLAFAFSALFISPDSGF

SEQ ID NO: 240 - protein, 1979 aa, Artificial Sequence
  TRIP11
MSSWLGGLGSGLGQSLGQVGGSLASLTGQISNFTKDMLMEGTEEVEAELPDSRTKEIEAIHAILRSENERLKKLCTDLEEKHEASEIQIKQQSTSYRNQLQQKEVEISHLKARQIALQDQLLKLQSAAQSVPSGAGVPATTASSSFAYGISHHPSAFHDDDMDFGDIISSQQEINRLSNEVSRLESEVGHWRHIAQTSKAQGTDNSDQSEICKLQNIIKELKQNRSQEIDDHQHEMSVLQNAHQQKLTEISRRHREELSDYEERIEELENLLQQGGSGVIETDLSKIYEMQKTIQVLQIEKVESTKKMEQLEDKIKDINKKLSSAENDRDILRREQEQLNVEKRQIMEECENLKLECSKLQPSAVKQSDTMTEKERILAQSASVEEVFRLQQALSDAENEIMRLSSLNQDNSLAEDNLKLKMRIEVLEKEKSLLSQEKEELQMSLLKLNNEYEVIKSTATRDISLDSELHDLRLNLEAKEQELNQSISEKETLIAEIEELDRQNQEATKHMILIKDQLSKQQNEGDSIISKLKQDLNDEKKRVHQLEDDKMDITKELDVQKEKLIQSEVALNDLHLTKQKLEDKVENLVDQLNKSQESNVSIQKENLELKEHIRQNEEELSRIRNELMQSLNQDSNSNFKDTLLKEREAEVRNLKQNLSELEQLNENLKKVAFDVKMENEKLVLACEDVRHQLEECLAGNNQLSLEKNTIVETLKMEKGEIEAELCWAKKRLLEEANKYEKTIEELSNARNLNTSALQLEHEHLIKLNQKKDMEIAELKKNIEQMDTDHKETKDVLSSSLEEQKQLTQLINKKEIFIEKLKERSSKLQEELDKYSQALRKNEILRQTIEEKDRSLGSMKEENNHLQEELERLREEQSRTAPVADPKTLDSVTELASEVSQLNTIKEHLEEEIKHHQKIIEDQNQSKMQLLQSLQEQKKEMDEFRYQHEQMNATHTQLFLEKDEEIKSLQKTIEQIKTQLHEERQDIQTDNSDIFQETKVQSLNIENGSEKHDLSKAETERLVKGIKERELEIKLLNEKNISLTKQIDQLSKDEVGKLTQIIQQKDLEIQALHARISSTSHTQDVVYLQQQLQAYAMEREKVFAVLNEKTRENSHLKTEYHKMMDIVAAKEAALIKLQDENKKLSTRFESSGQDMFRETIQNLSRIIREKDIEIDALSQKCQTLLAVLQTSSTGNEAGGVNSNQFEELLQERDKLKQQVKKMEEWKQQVMTTVQNMQHESAQLQEELHQLQAQVLVDSDNNSKLQVDYTGLIQSYEQNETKLKNFGQELAQVQHSIGQLCNTKDLLLGKLDIISPQLSSASLLTPQSAECLRASKSEVLSESSELLQQELEELRKSLQEKDATIRTLQENNHRLSDSIAATSELERKEHEQTDSEIKQLKEKQDVLQKLLKEKDLLIKAKSDQLLSSNENFTNKVNENELLRQAVTNLKERILILEMDIGKLKGENEKIVETYRGKETEYQALQETNMKFSMMLREKEFECHSMKEKALAFEQLLKEKEQGKTGELNQLLNAVKSMQEKTVVFQQERDQVMLALKQKQMENTALQNEVQRLRDKEFRSNQELERLRNHLLESEDSYTREALAAEDREAKLRKKVTVLEEKLVSSSNAMENASHQASVQVESLQEQLNVVSKQRDETALQLSVSQEQVKQYALSLANLQMVLEHFQQEEKAMYSAELEKQKQLIAEWKKNAENLEGKVISLQECLDEANAALDSASRLTEQLDVKEEQIEELKRQNELRQEMLDDVQKKLMSLANSSEGKVDKVLMRNLFIGHFHTPKNQRHEVLRLMGSILGVRREEMEQLFHDDQGGVTRWMTGWLGGGSKSVPNTPLRPNQQSVVNSSFSELFVKFLETESHPSIPPPKLSVHDMKPLDSPGRRKRDTNAPESFKDTAESRSGRRTDVNPFLAPRSAAVPLINPAGLGPGGPGHLLLKPISDVLPTFTPLPALPDNSAGVVLKDLLKQ

SEQ ID NO: 241 - protein, 348 aa, Artificial Sequence
  TUSC3
MGARGAPSRRRQAGRRLRYLPTGSFPFLLLLLLLCIQLGGGQKKKENLLAEKVEQLMEWSSRRSIFRMNGDKFRKFIKAPPRNYSMIVMFTALQPQRQCSVCRQANEEYQILANSWRYSSAFCNKLFFSMVDYDEGTDVFQQLNMNSAPTFMHFPPKGRPKRADTFDLQRIGFAAEQLAKWIADRTDVHIRVFRPPNYSGTIALALLVSLVGGLLYLRRNNLEFIYNKTGWAMVSLCIVFAMTSGQMWNHIRGPPYAHKNPHNGQVSYIHGSSQAQFVAESHIILVLNAAITMGMVLLNEAATSKGDVGKRRIICLVGLGLVVFFFSFLLSIFRSKYHGYPYSDLDFE

SEQ ID NO: 242 - protein, 216 aa, Artificial Sequence
  ALG14
MVCVLVLAAAAGAVAVFLILRIWVVLRSMDVTPRESLSILVVAGSGGHTTEILRLLGSLSNAYSPRHYVIADTDEMSANKINSFELDRADRDPSNMYTKYYIHRIPRSREVQQSWPSTVFTTLHSMWLSFPLIHRVKPDLVLCNGPGTCVPICVSALLLGILGIKKVIIVYVESICRVETLSMSGKILFHLSDYFIVQWPALKEKYPKSVYLGRIV

SEQ ID NO: 243 - protein, 398 aa, Artificial Sequence
  B4GALT1
MRLREPLLSGSAAMPGASLQRACRLLVAVCALHLGVTLVYYLAGRDLSRLPQLVGVSTPLQGGSNSAAAIGQSSGELRTGGARPPPPLGASSQPRPGGDSSPVVDSGPGPASNLTSVPVPHTTALSLPACPEESPLLVGPMLIEFNMPVDLELVAKQNPNVKMGGRYAPRDCVSPHKVAIIIPFRNRQEHLKYWLYYLHPVLQRQQLDYGIYVINQAGDTIFNRAKLLNVGFQEALKDYDYTCFVFSDVDLIPMNDHNAYRCFSQPRHISVAMDKFGFSLPYVQYFGGVSALSKQQFLTINGFPNNYWGWGGEDDDIFNRLVFRGMSISRPNAVVGRCRMIRHSRDKKNEPNPQRFDRIAHTKETMLSDGLNSLTYQVLDVQRYPLYTQITVDIGTPS

SEQ ID NO: 244 - protein, 456 aa, Artificial Sequence
  DDOST
MGYFRCARAGSFGRRRKMEPSTAARAWALFWLLLPLLGAVCASGPRTLVLLDNLNVRETHSLFFRSLKDRGFELTFKTADDPSLSLIKYGEFLYDNLIIFSPSVEDFGGNINVETISAFIDGGGSVLVAASSDIGDPLRELGSECGIEFDEEKTAVIDHHNYDISDLGQHTLIVADTENLLKAPTIVGKSSLNPILFRGVGMVADPDNPLVLDILTGSSTSYSFFPDKPITQYPHAVGKNTLLIAGLQARNNARVIFSGSLDFFSDSFFNSAVQKAAPGSQRYSQTGNYELAVALSRWVFKEEGVLRVGPVSHHRVGETAPPNAYTVTDLVEYSIVIQQLSNGKWVPFDGDDIQLEFVRIDPFVRTFLKKKGGKYSVQFKLPDVYGVFQFKVDYNRLGYTHLYSSTQVSVRPLQHTQYERFIPSAYPYYASAFSMMLGLFIFSIVFLHMKEKEKSD

SEQ ID NO: 245 - protein, 293 aa, Artificial Sequence
  NUS1
MTGLYELVWRVLHALLCLHRTLTSWLRVRFGTWNWIWRRCCRAASAAVLAPLGFTLRKPPAVGRNRRHHRHPRGGSCLAAAHHRMRWRADGRSLEKLPVHMGLVITEVEQEPSFSDIASLVVWCMAVGISYISVYDHQGIFKRNNSRLMDEILKQQQELLGLDCSKYSPEFANSNDKDDQVLNCHLAVKVLSPEDGKADIVRAAQDFCQLVAQKQKRPTDLDVDTLASLLSSNGCPDPDLVLKFGPVDSTLGFLPWHIRLTEIVSLPSHLNISYEDFFSALRQYAACEQRLGK

SEQ ID NO: 246 - protein, 631 aa, Artificial Sequence
  RPN2
MAPPGSSTVFLLALTIIASTWALTPTHYLTKHDVERLKASLDRPFTNLESAFYSIVGLSSLGAQVPDAKKACTYIRSNLDPSNVDSLFYAAQASQALSGCEISISNETKDLLLAAVSEDSSVTQIYHAVAALSGFGLPLASQEALSALTARLSKEETVLATVQALQTASHLSQQADLRSIVEEIEDLVARLDELGGVYLQFEEGLETTALFVAATYKLMDHVGTEPSIKEDQVIQLMNAIFSKKNFESLSEAFSVASAAAVLSHNRYHVPVVVVPEGSASDTHEQAILRLQVTNVLSQPLTQATVKLEHAKSVASRATVLQKTSFTPVGDVFELNFMNVKFSSGYYDFLVEVEGDNRYIANTVELRVKISTEVGITNVDLSTVDKDQSIAPKTTRVTYPAKAKGTFIADSHQNFALFFQLVDVNTGAELTPHQTFVRLHNQKTGQEVVFVAEPDNKNVYKFELDTSERKIEFDSASGTYTLYLIIGDATLKNPILWNVADVVIKFPEEEAPSTVLSQNLFTPKQEIQHLFREPEKRPPTVVSNTFTALILSPLLLLFALWIRIGANVSNFTFAPSTIIFHLGHAAMLGLMYVYWTQLNMFQTLKYLAILGSVTFLAGNRMLAQQAVKRTAH

SEQ ID NO: 247 - protein, 765 aa, Artificial Sequence
  SEC23A
MTTYLEFIQQNEERDGVRFSWNVWPSSRLEATRMVVPVAALFTPLKERPDLPPIQYEPVLCSRTTCRAVLNPLCQVDYRAKLWACNFCYQRNQFPPSYAGISELNQPAELLPQFSSIEYVVLRGPQMPLIFLYVVDTCMEDEDLQALKESMQMSLSLLPPTALVGLITFGRMVQVHELGCEGISKSYVFRGTKDLSAKQLQEMLGLSKVPLTQATRGPQVQQPPPSNRFLQPVQKIDMNLTDLLGELQRDPWPVPQGKRPLRSSGVALSIAVGLLECTFPNTGARIMMFIGGPATQGPGMVVGDELKTPIRSWHDIDKDNAKYVKKGTKHFEALANRAATTGHVIDIYACALDQTGLLEMKCCPNLTGGYMVMGDSFNTSLFKQTFQRVFTKDMHGQFKMGFGGTLEIKTSREIKISGAIGPCVSLNSKGPCVSENEIGTGGTCQWKICGLSPTTTLAIYFEVVNQHNAPIPQGGRGAIQFVTQYQHSSGQRRIRVTTIARNWADAQTQIQNIAASFDQEAAAILMARLAIYRAETEEGPDVLRWLDRQLIRLCQKFGEYHKDDPSSFRFSETFSLYPQFMFHLRRSSFLQVFNNSPDESSYYRHHFMRQDLTQSLIMIQPILYAYSFSGPPEPVLLDSSSILADRILLMDTFFQILIYHGETIAQWRKSGYQDMPEYENFRHLLQAPVDDAQEILHSRFPMPRYIDTEHGGSQARFLLSKVNPSQTHNNMYAWGQESGAPILTDDVSLQVFMDHLKKLAVSSAA

SEQ ID NO: 248 - protein, 325 aa, Artificial Sequence
  SLC35A3
MFANLKYVSLGILVFQTTSLVLTMRYSRTLKEEGPRYLSSTAVVVAELLKIMACILLVYKDSKCSLRALNRVLHDEILNKPMETLKLAIPSGIYTLQNNLLYVALSNLDAATYQVTYQLKILTTALFSVSMLSKKLGVYQWLSLVILMTGVAFVQWPSDSQLDSKELSAGSQFVGLMAVLTACFSSGFAGVYFEKILKETKQSVWIRNIQLGFFGSIFGLMGVYIYDGELVSKNGFFQGYNRLTWIVVVLQALGGLVIAAVIKYADNILKGFATSLSIILSTLISYFWLQDFVPTSVFFLGAILVITATFLYGYDPKPAGNPTKA

SEQ ID NO: 249 - protein, 375 aa, Artificial Sequence
  ST3GAL3
MGLLVFVRNLLLALCLFLVLGFLYYSAWKLHLLQWEEDSNSVVLSFDSAGQTLGSEYDRLGFLLNLDSKLPAELATKYANFSEGACKPGYASALMTAIFPRFSKPAPMFLDDSFRKWARIREFVPPFGIKGQDNLIKAILSVTKEYRLTPALDSLRCRRCIIVGNGGVLANKSLGSRIDDYDIVVRLNSAPVKGFEKDVGSKTTLRITYPEGAMQRPEQYERDSLFVLAGFKWQDFKWLKYIVYKERVSASDGFWKSVATRVPKEPPEIRILNPYFIQEAAFTLIGLPFNNGLMGRGNIPTLGSVAVTMALHGCDEVAVAGFGYDMSTPNAPLHYYETVRMAAIKESWTHNIQREKEFLRKLVKARVITDLSSGI

SEQ ID NO: 250 - protein, 705 aa, Artificial Sequence
  STT3A
MTKFGFLRLSYEKQDTLLKLLILSMAAVLSFSTRLFAVLRFESVIHEFDPYFNYRTTRFLAEEGFYKFHNWFDDRAWYPLGRIIGGTIYPGLMITSAAIYHVLHFFHITIDIRNVCVFLAPLFSSFTTIVTYHLTKELKDAGAGLLAAAMIAVVPGYISRSVAGSYDNEGIAIFCMLLTYYMWIKAVKTGSICWAAKCALAYFYMVSSWGGYVFLINLIPLHVLVLMLTGRFSHRIYVAYCTVYCLGTILSMQISFVGFQPVLSSEHMAAFGVFGLCQIHAFVDYLRSKLNPQQFEVLFRSVISLVGFVLLTVGALLMLTGKISPWTGRFYSLLDPSYAKNNIPIIASVSEHQPTTWSSYYFDLQLLVFMFPVGLYYCFSNLSDARIFIIMYGVTSMYFSAVMVRLMLVLAPVMCILSGIGVSQVLSTYMKNLDISRPDKKSKKQQDSTYPIKNEVASGMILVMAFFLITYTFHSTWVTSEAYSSPSIVLSARGGDGSRIIFDDFREAYYWLRHNTPEDAKVMSWWDYGYQITAMANRTILVDNNTWNNTHISRVGQAMASTEEKAYEIMRELDVSYVLVIFGGLTGYSSDDINKFLWMVRIGGSTDTGKHIKENDYYTPTGEFRVDREGSPVLLNCLMYKMCYYRFGQVYTEAKRPPGFDRVRNAEIGNKDFELDVLEEAYTTEHWLVRIYKVKDLDNRGLSRT

SEQ ID NO: 251 - protein, 826 aa, Artificial Sequence
  STT3B
MAEPSAPESKHKSSLNSSPWSGLMALGNSRHGHHGPGAQCAHKAAGGAAPPKPAPAGLSGGLSQPAGWQSLLSFTILFLAWLAGFSSRLFAVIRFESIIHEFDPWFNYRSTHHLASHGFYEFLNWFDERAWYPLGRIVGGTVYPGLMITAGLIHWILNTLNITVHIRDVCVFLAPTFSGLTSISTFLLTRELWNQGAGLLAACFIAIVPGYISRSVAGSFDNEGIAIFALQFTYYLWVKSVKTGSVFWTMCCCLSYFYMVSAWGGYVFIINLIPLHVFVLLLMQRYSKRVYIAYSTFYIVGLILSMQIPFVGFQPIRTSEHMAAAGVFALLQAYAFLQYLRDRLTKQEFQTLFFLGVSLAAGAVFLSVIYLTYTGYIAPWSGRFYSLWDTGYAKIHIPIIASVSEHQPTTWVSFFFDLHILVCTFPAGLWFCIKNINDERVFVALYAISAVYFAGVMVRLMLTLTPVVCMLSAIAFSNVFEHYLGDDMKRENPPVEDSSDEDDKRNQGNLYDKAGKVRKHATEQEKTEEGLGPNIKSIVTMLMLMLLMMFAVHCTWVTSNAYSSPSVVLASYNHDGTRNILDDFREAYFWLRQNTDEHARVMSWWDYGYQIAGMANRTTLVDNNTWNNSHIALVGKAMSSNETAAYKIMRTLDVDYVLVIFGGVIGYSGDDINKFLWMVRIAEGEHPKDIRESDYFTPQGEFRVDKAGSPTLLNCLMYKMSYYRFGEMQLDFRTPPGFDRTRNAEIGNKDIKFKHLEEAFTSEHWLVRIYKVKAPDNRETLDHKPRVTNIFPKQKYLSKKTTKRKRGYIKNKLVFKKGKKISKKTV

SEQ ID NO: 252 - protein, 346 aa, Artificial Sequence
  AGA
MARKSNLPVLLVPFLLCQALVRCSSPLPLVVNTWPFKNATEAAWRALASGGSALDAVESGCAMCEREQCDGSVGFGGSPDELGETTLDAMIMDGTTMDVGAVGDLRRIKNAIGVARKVLEHTTHTLLVGESATTFAQSMGFINEDLSTTASQALHSDWLARNCQPNYWRNVIPDPSKYCGPYKPPGILKQDIPIHKETEDDRGHDTIGMVVIHKTGHIAAGTSTNGIKFKIHGRVGDSPIPGAGAYADDTAGAAAATGNGDILMRFLPSYQAVEYMRRGEDPTIACQKVISRIQKHFPEFFGAVICANVTGSYGAACNKLSTFTQFSFMVYNSEKNQPTEEKVDCI

SEQ ID NO: 253 - protein, 507 aa, Artificial Sequence
  ARSA
MGAPRSLLLALAAGLAVARPPNIVLIFADDLGYGDLGCYGHPSSTTPNLDQLAAGGLRFTDFYVPVSLCTPSRAALLTGRLPVRMGMYPGVLVPSSRGGLPLEEVTVAEVLAARGYLTGMAGKWHLGVGPEGAFLPPHQGFHRFLGIPYSHDQGPCQNLTCFPPATPCDGGCDQGLVPIPLLANLSVEAQPPWLPGLEARYMAFAHDLMADAQRQDRPFFLYYASHHTHYPQFSGQSFAERSGRGPFGDSLMELDAAVGTLMTAIGDLGLLEETLVIFTADNGPETMRMSRGGCSGLLRCGKGTTYEGGVREPALAFWPGHIAPGVTHELASSLDLLPTLAALAGAPLPNVTLDGFDLSPLLLGTGKSPRQSLFFYPSYPDEVRGVFAVRTGKYKAHFFTQGSAHSDTTADPACHASSSLTAHEPPLLYDLSKDPGENYNLLGGVAGATPEVLQALKQLQLLKAQLDAAVTFGPSQVARGEDPALQICCHPGCTPRPACCHCPDPHA

SEQ ID NO: 254 - protein, 533 aa, Artificial Sequence
  ARSB
MGPRGAASLPRGPGPRRLLLPVVLPLLLLLLLAPPGSGAGASRPPHLVFLLADDLGWNDVGFHGSRIRTPHLDALAAGGVLLDNYYTQPLCTPSRSQLLTGRYQIRTGLQHQIIWPCQPSCVPLDEKLLPQLLKEAGYTTHMVGKWHLGMYRKECLPTRRGFDTYFGYLLGSEDYYSHERCTLIDALNVTRCALDFRDGEEVATGYKNMYSTNIFTKRAIALITNHPPEKPLFLYLALQSVHEPLQVPEEYLKPYDFIQDKNRHHYAGMVSLMDEAVGNVTAALKSSGLWNNTVFIFSTDNGGQTLAGGNNWPLRGRKWSLWEGGVRGVGFVASPLLKQKGVKNRELIHISDWLPTLVKLARGHTNGTKPLDGFDVWKTISEGSPSPRIELLHNIDPNFVDSSPCPRNSMAPAKDDSSLPEYSAFNTSVHAAIRHGNWKLLTGYPGCGYWFPPPSQYNVSEIPSSDPPTKTLWLFDIDRDPEERHDLSREYPHIVTKLLSRLQFYHKHSVPVYFPAQDPRCDPKATGVWGPWM

SEQ ID NO: 255 - protein, 395 aa, Artificial Sequence
  ASAH1
MPGRSCVALVLLAAAVSCAVAQHAPPWTEDCRKSTYPPSGPTYRGAVPWYTINLDLPPYKRWHELMLDKAPVLKVIVNSLKNMINTFVPSGKIMQVVDEKLPGLLGNFPGPFEEEMKGIAAVTDIPLGEIISFNIFYELFTICTSIVAEDKKGHLIHGRNMDFGVFLGWNINNDTWVITEQLKPLTVNLDFQRNNKTVFKASSFAGYVGMLTGFKPGLFSLTLNERFSINGGYLGILEWILGKKDVMWIGFLTRTVLENSTSYEEAKNLLTKTKILAPAYFILGGNQSGEGCVITRDRKESLDVYELDAKQGRWYVVQTNYDRWKHPFFLDDRRTPAKMCLNRTSQENISFETMYDVLSTKPVLNKLTVYTTLIDVTKGQFETYLRDCPDPCIGW

SEQ ID NO: 256 - protein, 1180 aa, Artificial Sequence
  ATP13A2
MSADSSPLVGSTPTGYGTLTIGTSIDPLSSSVSSVRLSGYCGSPWRVIGYHVVVWMMAGIPLLLFRWKPLWGVRLRLRPCNLAHAETLVIEIRDKEDSSWQLFTVQVQTEAIGEGSLEPSPQSQAEDGRSQAAVGAVPEGAWKDTAQLHKSEEAVSVGQKRVLRYYLFQGQRYIWIETQQAFYQVSLLDHGRSCDDVHRSRHGLSLQDQMVRKAIYGPNVISIPVKSYPQLLVDEALNPYYGFQAFSIALWLADHYYWYALCIFLISSISICLSLYKTRKQSQTLRDMVKLSMRVCVCRPGGEEEWVDSSELVPGDCLVLPQEGGLMPCDAALVAGECMVNESSLTGESIPVLKTALPEGLGPYCAETHRRHTLFCGTLILQARAYVGPHVLAVVTRTGFCTAKGGLVSSILHPRPINFKFYKHSMKFVAALSVLALLGTIYSIFILYRNRVPLNEIVIRALDLVTVVVPPALPAAMTVCTLYAQSRLRRQGIFCIHPLRINLGGKLQLVCFDKTGTLTEDGLDVMGVVPLKGQAFLPLVPEPRRLPVGPLLRALATCHALSRLQDTPVGDPMDLKMVESTGWVLEEEPAADSAFGTQVLAVMRPPLWEPQLQAMEEPPVPVSVLHRFPFSSALQRMSVVVAWPGATQPEAYVKGSPELVAGLCNPETVPTDFAQMLQSYTAAGYRVVALASKPLPTVPSLEAAQQLTRDTVEGDLSLLGLLVMRNLLKPQTTPVIQALRRTRIRAVMVTGDNLQTAVTVARGCGMVAPQEHLIIVHATHPERGQPASLEFLPMESPTAVNGVKDPDQAASYTVEPDPRSRHLALSGPTFGIIVKHFPKLLPKVLVQGTVFARMAPEQKTELVCELQKLQYCVGMCGDGANDCGALKAADVGISLSQAEASVVSPFTSSMASIECVPMVIREGRCSLDTSFSVFKYMALYSLTQFISVLILYTINTNLGDLQFLAIDLVITTTVAVLMSRTGPALVLGRVRPPGALLSVPVLSSLLLQMVLVTGVQLGGYFLTLAQPWFVPLNRTVAAPDNLPNYENTVVFSLSSFQYLILAAAVSKGAPFRRPLYTNVPFLVALALLSSVLVGLVLVPGLLQGPLALRNITDTGFKLLLLGLVTLNFVGAFMLESVLDQCLPACLRRLRPKRASKKRFKQLERELAEQPWPPLPAGPLR

SEQ ID NO: 257 - protein, 438 aa, Artificial Sequence
  CLN3
MGGCAGSRRRFSDSEGEETVPEPRLPLLDHQGAHWKNAVGFWLLGLCNNFSYVVMLSAAHDILSHKRTSGNQSHVDPGPTPIPHNSSSRFDCNSVSTAAVLLADILPTLVIKLLAPLGLHLLPYSPRVLVSGICAAGSFVLVAFSHSVGTSLCGVVFASISSGLGEVTFLSLTAFYPRAVISWWSSGTGGAGLLGALSYLGLTQAGLSPQQTLLSMLGIPALLLASYFLLLTSPEAQDPGGEEEAESAARQPLIRTEAPESKPGSSSSLSLRERWTVFKGLLWYIVPLVVVYFAEYFINQGLFELLFFWNTSLSHAQQYRWYQMLYQAGVFASRSSLRCCRIRFTWALALLQCLNLVFLLADVWFGFLPSIYLVFLIILYEGLLGGAAYVNTFHNIALETSDEHREFAMAATCISDTLGISLSGLLALPLHDFLCQLS

SEQ ID NO: 258 - protein, 358 aa, Artificial Sequence
  CLN5
MAQEVDTAQGAEMRRGAGAARGRASWCWALALLWLAVVPGWSRVSGIPSRRHWPVPYKRFDFRPKPDPYCQAKYTFCPTGSPIPVMEGDDDIEVFRLQAPVWEFKYGDLLGHLKIMHDAIGFRSTLTGKNYTMEWYELFQLGNCTFPHLRPEMDAPFWCNQGAACFFEGIDDVHWKENGTLVQVATISGNMFNQMAKWVKQDNETGIYYETWNVKASPEKGAETWFDSYDCSKFVLRTFNKLAEFGAEFKNIETNYTRIFLYSGEPTYLGNETSVFGPTGNKTLGLAIKRFYYPFKPHLPTKEFLLSLLQIFDAVIVHKQFYLFYNFEYWFLPMKFPFIKITYEEIPLPIRNKTLSGL

SEQ ID NO: 259 - protein, 311 aa, Artificial Sequence
  CLN6
MEATRRRQHLGATGGPGAQLGASFLQARHGSVSADEAARTAPFHLDLWFYFTLQNWVLDFGRPIAMLVFPLEWFPLNKPSVGDYFHMAYNVITPFLLLKLIERSPRTLPRSITYVSIIIFIMGASIHLVGDSVNHRLLFSGYQHHLSVRENPIIKNLKPETLIDSFELLYYYDEYLGHCMWYIPFFLILFMYFSGCFTASKAESLIPGPALLLVAPSGLYYWYLVTEGQIFILFIFTFFAMLALVLHQKRKRLFLDSNGLFLFSSFALTLLLVALWVAWLWNDPVLRKKYPGVIYVPEPWAFYTLHVSSRH

SEQ ID NO: 260 - protein, 286 aa, Artificial Sequence
  CLN8
MNPASDGGTSESIFDLDYASWGIRSTLMVAGFVFYLGVFVVCHQLSSSLNATYRSLVAREKVFWDLAATRAVFGVQSTAAGLWALLGDPVLHADKARGQQNWCWFHITTATGFFCFENVAVHLSNLIFRTFDLFLVIHHLFAFLGFLGCLVNLQAGHYLAMTTLLLEMSTPFTCVSWMLLKAGWSESLFWKLNQWLMIHMFHCRMVLTYHMWWVCFWHWDGLVSSLYLPHLTLFLVGLALLTLIINPYWTHKKTQQLLNPVDWNFAQPEAKSRPEGNGQLLRKKRP

SEQ ID NO: 261 - protein, 367 aa, Artificial Sequence
  CTNS
MIRNWLTIFILFPLKLVEKCESSVSLTVPPVVKLENGSSTNVSLTLRPPLNATLVITFEITFRSKNITILELPDEVVVPPGVTNSSFQVTSQNVGQLTVYLHGNHSNQTGPRIRFLVIRSSAISIINQVIGWIYFVAWSISFYPQVIMNWRRKSVIGLSFDFVALNLTGFVAYSVFNIGLLWVPYIKEQFLLKYPNGVNPVNSNDVFFSLHAVVLTLIIIVQCCLYERGGQRVSWPAIGFLVLAWLFAFVTMIVAAVGVTTWLQFLFCFSYIKLAVTLVKYFPQAYMNFYYKSTEGWSIGNVLLDFTGGSFSLLQMFLQSYNNDQWTLIFGDPTKFGLGVFSIVFDVVFFIQHFCLYRKRPGYDQLN

SEQ ID NO: 262 - protein, 480 aa, Artificial Sequence
  CTSA
MIRAAPPPLFLLLLLLLLLVSWASRGEAAPDQDEIQRLPGLAKQPSFRQYSGYLKGSGSKHLHYWFVESQKDPENSPVVLWLNGGPGCSSLDGLLTEHGPFLVQPDGVTLEYNPYSWNLIANVLYLESPAGVGFSYSDDKFYATNDTEVAQSNFEALQDFFRLFPEYKNNKLFLTGESYAGIYIPTLAVLVMQDPSMNLQGLAVGNGLSSYEQNDNSLVYFAYYHGLLGNRLWSSLQTHCCSQNKCNFYDNKDLECVTNLQEVARIVGNSGLNIYNLYAPCAGGVPSHFRYEKDTVVVQDLGNIFTRLPLKRMWHQALLRSGDKVRMDPPCTNTTAASTYLNNPYVRKALNIPEQLPQWDMCNFLVNLQYRRLYRSMNSQYLKLLSSQKYQILLYNGDVDMACNFMGDEWFVDSLNQKMEVQRRPWLVKYGDSGEQIAGFVKEFSHIAFLTIKGAGHMVPTDKPLAAFTMFSRFLNKQPY

SEQ ID NO: 263 - protein, 412 aa, Artificial Sequence
  CTSD
MQPSSLLPLALCLLAAPASALVRIPLHKFTSIRRTMSEVGGSVEDLIAKGPVSKYSQAVPAVTEGPIPEVLKNYMDAQYYGEIGIGTPPQCFTVVFDTGSSNLWVPSIHCKLLDIACWIHHKYNSDKSSTYVKNGTSFDIHYGSGSLSGYLSQDTVSVPCQSASSASALGGVKVERQVFGEATKQPGITFIAAKFDGILGMAYPRISVNNVLPVFDNLMQQKLVDQNIFSFYLSRDPDAQPGGELMLGGTDSKYYKGSLSYLNVTRKAYWQVHLDQVEVASGLTLCKEGCEAIVDTGTSLMVGPVDEVRELQKAIGAVPLIQGEYMIPCEKVSTLPAITLKLGGKGYKLSPEDYTLKVSQAGKTLCLSGFMGMDIPPPSGPLWILGDVFIGRYYTVFDRDNNRVGFAEAARL

SEQ ID NO: 264 - protein, 484 aa, Artificial Sequence [sequence omitted]

SEQ ID NO: 265 - protein, 329 aa, Artificial Sequence
  CTSK
MWGLKVLLLPVVSFALYPEEILDTHWELWKKTHRKQYNNKVDEISRRLIWEKNLKYISIHNLEASLGVHTYELAMNHLGDMTSEEVVQKMTGLKVPLSHSRSNDTLYIPEWEGRAPDSVDYRKKGYVTPVKNQGQCGSCWAFSSVGALEGQLKKKTGKLLNLSPQNLVDCVSENDGCGGGYMTNAFQYVQKNRGIDSEDAYPYVGQEESCMYNPTGKAAKCRGYREIPEGNEKALKRAVARVGPVSVAIDASLTSFQFYSKGVYYDESCNSDNLNHAVLAVGYGIQKGNKHWIIKNSWGENWGNKGYILMARNKNNACGIANLASFPKM

SEQ ID NO: 266 - protein, 198 aa, Artificial Sequence
  DNAJC5
MADQRQRSLSTSGESLYHVLGLDKNATSDDIKKSYRKLALKYHPDKNPDNPEAADKFKEINNAHAILTDATKRNIYDKYGSLGLYVAEQFGEENVNTYFVLSSWWAKALFVFCGLLTCCYCCCCLCCCFNCCCGKCKPKAPEGEETEFYVSPEDLEAQLQSDEREATDTPIVIQPASATETTQLTADSHPSYHTDGFN

SEQ ID NO: 267 - protein, 466 aa, Artificial Sequence
  FUCA1
MRAPGMRSRPAGPALLLLLLFLGAAESVRRAQPPRRYTPDWPSLDSRPLPAWFDEAKFGVFIHWGVFSVPAWGSEWFWWHWQGEGRPQYQRFMRDNYPPGFSYADFGPQFTARFFHPEEWADLFQAAGAKYVVLTTKHHEGFTNWPSPVSWNWNSKDVGPHRDLVGELGTALRKRNIRYGLYHSLLEWFHPLYLLDKKNGFKTQHFVSAKTMPELYDLVNSYKPDLIWSDGEWECPDTYWNSTNFLSWLYNDSPVKDEVVVNDRWGQNCSCHHGGYYNCEDKFKPQSLPDHKWEMCTSIDKFSWGYRRDMALSDVTEESEIISELVQTVSLGGNYLLNIGPTKDGLIVPIFQERLLAVGKWLSINGEAIYASKPWRVQWEKNTTSVWYTSKGSAVYAIFLHWPENGVLNLESPITTSTTKITMLGIQGDLKWSTDPDKGLFISLPQLPPSAVPAEFAWTIKLTGVK

SEQ ID NO: 268 - protein, 952 aa, Artificial Sequence
  GAA
MGVRHPPCSHRLLAVCALVSLATAALLGHILLHDFLLVPRELSGSSPVLEETHPAHQQGASRPGPRDAQAHPGRPRAVPTQCDVPPNSRFDCAPDKAITQEQCEARGCCYIPAKQGLQGAQMGQPWCFFPPSYPSYKLENLSSSEMGYTATLTRTTPTFFPKDILTLRLDVMMETENRLHFTIKDPANRRYEVPLETPHVHSRAPSPLYSVEFSEEPFGVIVRRQLDGRVLLNTTVAPLFFADQFLQLSTSLPSQYITGLAEHLSPLMLSTSWTRITLWNRDLAPTPGANLYGSHPFYLALEDGGSAHGVFLLNSNAMDVVLQPSPALSWRSTGGILDVYIFLGPEPKSVVQQYLDVVGYPFMPPYWGLGFHLCRWGYSSTAITRQVVENMTRAHFPLDVQWNDLDYMDSRRDFTFNKDGFRDFPAMVQELHQGGRRYMMIVDPAISSSGPAGSYRPYDEGLRRGVFITNETGQPLIGKVWPGSTAFPDFTNPTALAWWEDMVAEFHDQVPFDGMWIDMNEPSNFIRGSEDGCPNNELENPPYVPGVVGGTLQAATICASSHQFLSTHYNLHNLYGLTEAIASHRALVKARGTRPFVISRSTFAGHGRYAGHWTGDVWSSWEQLASSVPEILQFNLLGVPLVGADVCGFLGNTSEELCVRWTQLGAFYPFMRNHNSLLSLPQEPYSFSEPAQQAMRKALTLRYALLPHLYTLFHQAHVAGETVARPLFLEFPKDSSTWTVDHQLLWGEALLITPVLQAGKAEVTGYFPLGTWYDLQTVPVEALGSLPPPPAAPREPAIHSEGQWVTLPAPLDTINVHLRAGYIIPLQGPGLTTTESRQQPMALAVALTKGGEARGELFWDDGESLEVLERGAYTQVIFLARNNTIVNELVRVTSEGAGLQLQKVTVLGVATAPQQVLSNGVPVSNFTYSPDTKVLDICVSLLMGEQFLVSWC

SEQ ID NO: 269 - protein, 685 aa, Artificial Sequence
  GALC
MAEWLLSASWQRRAKAMTAAAGSAGRAAVPLLLCALLAPGGAYVLDDSDGLGREFDGIGAVSGGGATSRLLVNYPEPYRSQILDYLFKPNFGASLHILKVEIGGDGQTTDGTEPSHMHYALDENYFRGYEWWLMKEAKKRNPNITLIGLPWSFPGWLGKGFDWPYVNLQLTAYYVVTWIVGAKRYHDLDIDYIGIWNERSYNANYIKILRKMLNYQGLQRVKIIASDNLWESISASMLLDAELFKVVDVIGAHYPGTHSAKDAKLTGKKLWSSEDFSTLNSDMGAGCWGRILNQNYINGYMTSTIAWNLVASYYEQLPYGRCGLMTAQEPWSGHYVVESPVWVSAHTTQFTQPGWYYLKTVGHLEKGGSYVALTDGLGNLTIIIETMSHKHSKCIRPFLPYFNVSQQFATFVLKGSFSEIPELQVWYTKLGKTSERFLFKQLDSLWLLDSDGSFTLSLHEDELFTLTTLTTGRKGSYPLPPKSQPFPSTYKDDFNVDYPFFSEAPNFADQTGVFEYFTNIEDPGEHHFTLRQVLNQRPITWAADASNTISIIGDYNWTNLTIKCDVYIETPDTGGVFIAGRVNKGGILIRSARGIFFWIFANGSYRVTGDLAGWIIYALGRVEVTAKKWYTLTLTIKGHFTSGMLNDKSLWTDIPVNFPKNGWAAIGTHSFEFAQFDNFLVEATR

SEQ ID NO: 270 - protein, 522 aa, Artificial Sequence
  GALNS
MAAVVAATRWWQLLLVLSAAGMGASGAPQPPNILLLLMDDMGWGDLGVYGEPSRETPNLDRMAAEGLLFPNFYSANPLCSPSRAALLTGRLPIRNGFYTTNAHARNAYTPQEIVGGIPDSEQLLPELLKKAGYVSKIVGKWHLGHRPQFHPLKHGFDEWFGSPNCHFGPYDNKARPNIPVYRDWEMVGRYYEEFPINLKTGEANLTQIYLQEALDFIKRQARHHPFFLYWAVDATHAPVYASKPFLGTSQRGRYGDAVREIDDSIGKILELLQDLHVADNTFVFFTSDNGAALISAPEQGGSNGPFLCGKQTTFEGGMREPALAWWPGHVTAGQVSHQLGSIMDLFTTSLALAGLTPPSDRAIDGLNLLPTLLQGRLMDRPIFYYRGDTLMAATLGQHKAHFWTWTNSWENFRQGIDFCPGQNVSGVTTHNLEDHTKLPLIFHLGRDPGERFPLSFASAEYQEALSRITSVVQQHQEALVPAQPQLNVCNWAVMNWAPPGCEKLGKCLTPPESIPKKCLWSH

SEQ ID NO: 271 - protein, 429 aa, Artificial Sequence
  GLA
MQLRNPELHLGCALALRFLALVSWDIPGARALDNGLARTPTMGWLHWERFMCNLDCQEEPDSCISEKLFMEMAELMVSEGWKDAGYEYLCIDDCWMAPQRDSEGRLQADPQRFPHGIRQLANYVHSKGLKLGIYADVGNKTCAGFPGSFGYYDIDAQTFADWGVDLLKFDGCYCDSLENLADGYKHMSLALNRTGRSIVYSCEWPLYMWPFQKPNYTEIRQYCNHWRNFADIDDSWKSIKSILDWTSFNQERIVDVAGPGGWNDPDMLVIGNFGLSWNQQVTQMALWAIMAAPLFMSNDLRHISPQAKALLQDKDVIAINQDPLGKQGYQLRQGDNFEVWERPLSGLAWAVAMINRQEIGGPRSYTIAVASLGKGVACNPACFITQLLPVKRKLGFYEWTSRLRSHINPTGTVLLQLENTMQMSLKDLL

SEQ ID NO: 272 - protein, 677 aa, Artificial Sequence
  GLB1
MPGFLVRILPLLLVLLLLGPTRGLRNATQRMFEIDYSRDSFLKDGQPFRYISGSIHYSRVPRFYWKDRLLKMKMAGLNAIQTYVPWNFHEPWPGQYQFSEDHDVEYFLRLAHELGLLVILRPGPYICAEWEMGGLPAWLLEKESILLRSSDPDYLAAVDKWLGVLLPKMKPLLYQNGGPVITVQVENEYGSYFACDFDYLRFLQKRFRHHLGDDVVLFTTDGAHKTFLKCGALQGLYTTVDFGTGSNITDAFLSQRKCEPKGPLINSEFYTGWLDHWGQPHSTIKTEAVASSLYDILARGASVNLYMFIGGTNFAYWNGANSPYAAQPTSYDYDAPLSEAGDLTEKYFALRNIIQKFEKVPEGPIPPSTPKFAYGKVTLEKLKTVGAALDILCPSGPIKSLYPLTFIQVKQHYGFVLYRTTLPQDCSNPAPLSSPLNGVHDRAYVAVDGIPQGVLERNNVITLNITGKAGATLDLLVENMGRVNYGAYINDFKGLVSNLTLSSNILTDWTIFPLDTEDAVRSHLGGWGHRDSGHHDEAWAHNSSNYTLPAFYMGNFSIPSGIPDLPQDTFIQFPGWTKGQVWINGFNLGRYWPARGPQLTLFVPQHILMTSAPNTITVLELEWAPCSSDDPELCAVTFVDRPVIGSSVTYDHPSKPVEKRLMPPPPQKNKDSWLDHV

SEQ ID NO: 273 - protein, 193 aa, Artificial Sequence
  GM2A
MQSLMQAPLLIALGLLLAAPAQAHLKKPSQLSSFSWDNCDEGKDPAVIRSLTLEPDPIIVPGNVTLSVMGSTSVPLSSPLKVDLVLEKEVAGLWIKIPCTDYIGSCTFEHFCDVLDMLIPTGEPCPEPLRTYGLPCHCPFKEGTYSLPKSEFVVPDLELPSWLTTGNYRIESVLSSSGKRLGCIKIAASLKGI

SEQ ID NO: 274 - protein, 1256 aa, Artificial Sequence
  GNPTAB
MLFKLLQRQTYTCLSHRYGLYVCFLGVVVTIVSAFQFGEVVLEWSRDQYHVLFDSYRDNIAGKSFQNRLCLPMPIDVVYTWVNGTDLELLKELQQVREQMEEEQKAMREILGKNTTEPTKKSEKQLECLLTHCIKVPMLVLDPALPANITLKDLPSLYPSFHSASDIFNVAKPKNPSTNVSVVVFDSTKDVEDAHSGLLKGNSRQTVWRGYLTTDKEVPGLVLMQDLAFLSGFPPTFKETNQLKTKLPENLSSKVKLLQLYSEASVALLKLNNPKDFQELNKQTKKNMTIDGKELTISPAYLLWDLSAISQSKQDEDISASRFEDNEELRYSLRSIERHAPWVRNIFIVTNGQIPSWLNLDNPRVTIVTHQDVFRNLSHLPTFSSPAIESHIHRIEGLSQKFIYLNDDVMFGKDVWPDDFYSHSKGQKVYLTWPVPNCAEGCPGSWIKDGYCDKACNNSACDWDGGDCSGNSGGSRYIAGGGGTGSIGVGQPWQFGGGINSVSYCNQGCANSWLADKFCDQACNVLSCGFDAGDCGQDHFHELYKVILLPNQTHYIIPKGECLPYFSFAEVAKRGVEGAYSDNPIIRHASIANKWKTIHLIMHSGMNATTIHFNLTFQNTNDEEFKMQITVEVDTREGPKLNSTAQKGYENLVSPITLLPEAEILFEDIPKEKRFPKFKRHDVNSTRRAQEEVKIPLVNISLLPKDAQLSLNTLDLQLEHGDITLKGYNLSKSALLRSFLMNSQHAKIKNQAIITDETNDSLVAPQEKQVHKSILPNSLGVSERLQRLTFPAVSVKVNGHDQGQNPPLDLETTARFRVETHTQKTIGGNVTKEKPPSLIVPLESQMTKEKKITGKEKENSRMEENAENHIGVTEVLLGRKLQHYTDSYLGFLPWEKKKYFQDLLDEEESLKTQLAYFTDSKNTGRQLKDTFADSLRYVNKILNSKFGFTSRKVPAHMPHMIDRIVMQELQDMFPEEFDKTSFHKVRHSEDMQFAFSYFYYLMSAVQPLNISQVFDEVDTDQSGVLSDREIRTLATRIHELPLSLQDLTGLEHMLINCSKMLPADITQLNNIPPTQESYYDPNLPPVTKSLVTNCKPVTDKIHKAYKDKNKYRFEIMGEEEIAFKMIRTNVSHVVGQLDDIRKNPRKFVCLNDNIDHNHKDAQTVKAVLRDFYESMFPIPSQFELPREYRNRFLHMHELQEWRAYRDKLKFWTHCVLATLIMFTIFSFFAEQLIALKRKIFPRRRIHKEASPNRIRV

SEQ ID NO: 275 - protein, 305 aa, Artificial Sequence
  GNPTG
MAAGLARLLLLLGLSAGGPAPAGAAKMKVVEEPNAFGVNNPFLPQASRLQAKRDPSPVSGPVHLFRLSGKCFSLVESTYKYEFCPFHNVTQHEQTFRWNAYSGILGIWHEWEIANNTFTGMWMRDGDACRSRSRQSKVELACGKSNRLAHVSEPSTCVYALTFETPLVCHPHALLVYPTLPEALQRQWDQVEQDLADELITPQGHEKLLRTLFEDAGYLKTPEENEPTQLEGGPDSLGFETLENCRKAHKELSKEIKRLKGLLTQHGIPYTRPTETSNLEHLGHETPRAKSPEQLRGDPGLRGSL

SEQ ID NO: 276 - protein, 552 aa, Artificial Sequence
  GNS
MRLLPLAPGRLRRGSPRHLPSCSPALLLLVLGGCLGVFGVAAGTRRPNVVLLLTDDQDEVLGGMTPLKKTKALIGEMGMTFSSAYVPSALCCPSRASILTGKYPHNHHVVNNTLEGNCSSKSWQKIQEPNTFPAILRSMCGYQTFFAGKYLNEYGAPDAGGLEHVPLGWSYWYALEKNSKYYNYTLSINGKARKHGENYSVDYLTDVLANVSLDFLDYKSNFEPFFMMIATPAPHSPWTAAPQYQKAFQNVFAPRNKNFNIHGTNKHWLIRQAKTPMTNSSIQFLDNAFRKRWQTLLSVDDLVEKLVKRLEFTGELNNTYIFYTSDNGYHTGQFSLPIDKRQLYEFDIKVPLLVRGPGIKPNQTSKMLVANIDLGPTILDIAGYDLNKTQMDGMSLLPILRGASNLTWRSDVLVEYQGEGRNVTDPTCPSLSPGVSQCFPDCVCEDAYNNTYACVRTMSALWNLQYCEFDDQEVFVEVYNLTADPDQITNIAKTIDPELLGKMNYRLMMLQSCSGPTCRTPGVFDPGYRFDPRLMFSNRGSVRTRRFSKHLL

SEQ ID NO: 277 - protein, 593 aa, Artificial Sequence
  GRN
MWTLVSWVALTAGLVAGTRCPDGQFCPVACCLDPGGASYSCCRPLLDKWPTTLSRHLGGPCQVDAHCSAGHSCIFTVSGTSSCCPFPEAVACGDGHHCCPRGFHCSADGRSCFQRSGNNSVGAIQCPDSQFECPDFSTCCVMVDGSWGCCPMPQASCCEDRVHCCPHGAFCDLVHTRCITPTGTHPLAKKLPAQRTNRAVALSSSVMCPDARSRCPDGSTCCELPSGKYGCCPMPNATCCSDHLHCCPQDTVCDLIQSKCLSKENATTDLLTKLPAHTVGDVKCDMEVSCPDGYTCCRLQSGAWGCCPFTQAVCCEDHIHCCPAGFTCDTQKGTCEQGPHQVPWMEKAPAHLSLPDPQALKRDVPCDNVSSCPSSDTCCQLTSGEWGCCPIPEAVCCSDHQHCCPQGYTCVAEGQCQRGSEIVAGLEKMPARRASLSHPRDIGCDQHTSCPVGQTCCPSLGGSWACCQLPHAVCCEDRQHCCPAGYTCNVKARSCEKEVVSAQPATFLARSPHVGVKDVECGEGHFCHDNQTCCRDNRQGWACCPYRQGVCCADRRHCCPAGFRCAARGTKCLRREAPRWDAPLRDPALRQLL

SEQ ID NO: 278 - protein, 651 aa, Artificial Sequence
  GUSB
MARGSAVAWAALGPLLWGCALGLQGGMLYPQESPSRECKELDGLWSFRADFSDNRRRGFEEQWYRRPLWESGPTVDMPVPSSFNDISQDWRLRHFVGWVWYEREVILPERWTQDLRTRVVLRIGSAHSYAIVWVNGVDTLEHEGGYLPFEADISNLVQVGPLPSRLRITIAINNTLTPTTLPPGTIQYLTDTSKYPKGYFVQNTYFDFFNYAGLQRSVLLYTTPTTYIDDITVTTSVEQDSGLVNYQISVKGSNLFKLEVRLLDAENKVVANGTGTQGQLKVPGVSLWWPYLMHERPAYLYSLEVQLTAQTSLGPVSDFYTLPVGIRTVAVTKSQFLINGKPFYFHGVNKHEDADIRGKGFDWPLLVKDFNLLRWLGANAFRTSHYPYAEEVMQMCDRYGIVVIDECPGVGLALPQFFNNVSLHHHMQVMEEVVRRDKNHPAVVMWSVANEPASHLESAGYYLKMVIAHTKSLDPSRPVTFVSNSNYAADKGAPYVDVICLNSYYSWYHDYGHLELIQLQLATQFENWYKKYQKPIIQSEYGAETIAGFHQDPPLMFTEEYQKSLLEQYHLGLDQKRRKYVVGELIWNFADFMTEQSPTRVLGNKKGIFTRQRQPKSAAFLLRERYWKIANETRYPHSVAKSQCLENSLFT

SEQ ID NO: 279 - protein, 529 aa, Artificial Sequence
  HEXA
MTSSRLWFSLLLAAAFAGRATALWPWPQNFQTSDQRYVLYPNNFQFQYDVSSAAQPGCSVLDEAFQRYRDLLFGSGSWPRPYLTGKRHTLEKNVLVVSVVTPGCNQLPTLESVENYTLTINDDQCLLLSETVWGALRGLETFSQLVWKSAEGTFFINKTEIEDFPRFPHRGLLLDTSRHYLPLSSILDTLDVMAYNKLNVFHWHLVDDPSFPYESFTFPELMRKGSYNPVTHIYTAQDVKEVIEYARLRGIRVLAEFDTPGHTLSWGPGIPGLLTPCYSGSEPSGTFGPVNPSLNNTYEFMSTFFLEVSSVFPDFYLHLGGDEVDFTCWKSNPEIQDFMRKKGFGEDFKQLESFYIQTLLDIVSSYGKGYVVWQEVFDNKVKIQPDTIIQVWREDIPVNYMKELELVTKAGFRALLSAPWYLNRISYGPDWKDFYIVEPLAFEGTPEQKALVIGGEACMWGEYVDNTNLVPRLWPRAGAVAERLWSNKLTSDLTFAYERLSHFRCELLRRGVQAQPLNVGFCEQEFEQT

SEQ ID NO: 280 - protein, 556 aa, Artificial Sequence
  HEXB
MELCGLGLPRPPMLLALLLATLLAAMLALLTQVALVVQVAEAARAPSVSAKPGPALWPLPLSVKMTPNLLHLAPENFYISHSPNSTAGPSCTLLEEAFRRYHGYIFGFYKWHHEPAEFQAKTQVQQLLVSITLQSECDAFPNISSDESYTLLVKEPVAVLKANRVWGALRGLETFSQLVYQDSYGTFTINESTIIDSPRFSHRGILIDTSRHYLPVKIILKTLDAMAFNKFNVLHWHIVDDQSFPYQSITFPELSNKGSYSLSHVYTPNDVRMVIEYARLRGIRVLPEFDTPGHTLSWGKGQKDLLTPCYSRQNKLDSFGPINPTLNTTYSFLTTFFKEISEVFPDQFIHLGGDEVEFKCWESNPKIQDFMRQKGFGTDFKKLESFYIQKVLDIIATINKGSIVWQEVFDDKAKLAPGTIVEVWKDSAYPEELSRVTASGFPVILSAPWYLDLISYGQDWRKYYKVEPLDFGGTQKQKQLFIGGEACLWGEYVDATNLTPRLWPRASAVGERLWSSKDVRDMDDAYDRLTRHRCRMVERGIAAQPLYAGYCNHENM

SEQ ID NO: 281 - protein, 663 aa, Artificial Sequence
  HGSNAT
MTGARASAAEQRRAGRSGQARAAERAAGMSGAGRALAALLLAASVLSAALLAPGGSSGRDAQAAPPRDLDKKRHAELKMDQALLLIHNELLWTNLTVYWKSECCYHCLFQVLVNVPQSPKAGKPSAAAASVSTQHGSILQLNDTLEEKEVCRLEYRFGEFGNYSLLVKNIHNGVSEIACDLAVNEDPVDSNLPVSIAFLIGLAVIIVISFLRLLLSLDDFNNWISKAISSRETDRLINSELGSPSRTDPLDGDVQPATWRLSALPPRLRSVDTFRGIALILMVFVNYGGGKYWYFKHASWNGLTVADLVFPWFVFIMGSSIFLSMTSILQRGCSKFRLLGKIAWRSFLLICIGIIIVNPNYCLGPLSWDKVRIPGVLQRLGVTYFVVAVLELLFAKPVPEHCASERSCLSLRDITSSWPQWLLILVLEGLWLGLTFLLPVPGCPTGYLGPGGIGDFGKYPNCTGGAAGYIDRLLLGDDHLYQHPSSAVLYHTEVAYDPEGILGTINSIVMAFLGVQAGKILLYYKARTKDILIRFTAWCCILGLISVALTKVSENEGFIPVNKNLWSLSYVTTLSSFAFFILLVLYPVVDVKGLWTGTPFFYPGMNSILVYVGHEVFENYFPFQWKLKDNQSHKEHLTQNIVATALWVLIAYILYRKKIFWKI

SEQ ID NO: 282 - protein, 435 aa, Artificial Sequence
  HYAL1
MAAHLLPICALFLTLLDMAQGFRGPLLPNRPFTTVWNANTQWCLERHGVDVDVSVFDVVANPGQTFRGPDMTIFYSSQLGTYPYYTPTGEPVFGGLPQNASLIAHLARTFQDILAAIPAPDFSGLAVIDWEAWRPRWAFNWDTKDIYRQRSRALVQAQHPDWPAPQVEAVAQDQFQGAARAWMAGTLQLGRALRPRGLWGFYGFPDCYNYDFLSPNYTGQCPSGIRAQNDQLGWLWGQSRALYPSIYMPAVLEGTGKSQMYVQHRVAEAFRVAVAAGDPNLPVLPYVQIFYDTTNHFLPLDELEHSLGESAAQGAAGVVLWVSWENTRTKESCQAIKEYMDTTLGPFILNVTSGALLCSQALCSGHGRCVRRTSHPKALLLLNPASFSIQLTPGGGPLSLRGALSLEDQAQMAVEFKCRCYPGWQAPWCERKSMW

SEQ ID NO: 283 - protein, 550 aa, Artificial Sequence
  IDS
MPPPRTGRGLLWLGLVLSSVCVALGSETQANSTTDALNVLLIIVDDLRPSLGCYGDKLVRSPNIDQLASHSLLFQNAFAQQAVCAPSRVSFLTGRRPDTTRLYDFNSYWRVHAGNFSTIPQYFKENGYVTMSVGKVFHPGISSNHTDDSPYSWSFPPYHPSSEKYENTKTCRGPDGELHANLLCPVDVLDVPEGTLPDKQSTEQAIQLLEKMKTSASPFFLAVGYHKPHIPFRYPKEFQKLYPLENITLAPDPEVPDGLPPVAYNPWMDIRQREDVQALNISVPYGPIPVDFQRKIRQSYFASVSYLDTQVGRLLSALDDLQLANSTIIAFTSDHGWALGEHGEWAKYSNFDVATHVPLIFYVPGRTASLPEAGEKLFPYLDPFDSASQLMEPGRQSMDLVELVSLFPTLAGLAGLQVPPRCPVPSFHVELCREGKNLLKHFRFRDLEEDPYLPGNPRELIAYSQYPRPSDIPQWNSDKPSLKDIKIMGYSIRTIDYRYTVWVGFNPDEFLANFSDIHAGELYFVDSDPLQDHNMYNDSQGGDLFQLLMP

SEQ ID NO: 284 - protein, 653 aa, Artificial Sequence
  IDUA
MRPLRPRAALLALLASLLAAPPVAPAEAPHLVHVDAARALWPLRRFWRSTGFCPPLPHSQADQYVLSWDQQLNLAYVGAVPHRGIKQVRTHWLLELVTTRGSTGRGLSYNFTHLDGYLDLLRENQLLPGFELMGSASGHFTDFEDKQQVFEWKDLVSSLARRYIGRYGLAHVSKWNFETWNEPDHHDFDNVSMTMQGFLNYYDACSEGLRAASPALRLGGPGDSFHTPPRSPLSWGLLRHCHDGTNFFTGEAGVRLDYISLHRKGARSSISILEQEKVVAQQIRQLFPKFADTPIYNDEADPLVGWSLPQPWRADVTYAAMVVKVIAQHQNLLLANTTSAFPYALLSNDNAFLSYHPHPFAQRTLTARFQVNNTRPPHVQLLRKPVLTAMGLLALLDEEQLWAEVSQAGTVLDSNHTVGVLASAHRPQGPADAWRAAVLIYASDDTRAHPNRSVAVTLRLRGVPPGPGLVYVTRYLDNGLCSPDGEWRRLGRPVFPTAEQFRRMRAAEDPVAAAPRPLPAGGRLTLRPALRLPSLLLVHVCARPEKPPGQVTRLRALPLTQGQLVLVWSDEHVGSKCLWTYEIQFSQDGKAYTPVSRKPSTFNLFVFSPDTGAVSGSYRVRALDYWARPGPFSDPVPYLEVPVPRGPPSPGNP

SEQ ID NO: 285 - protein, 289 aa, Artificial Sequence
  KCTD7
MVVVTGREPDSRRQDGAMSSSDAEDDFLEPATPTATQAGHALPLLPQEFPEVVPLNIGGAHFTTRLSTLRCYEDTMLAAMFSGRHYIPTDSEGRYFIDRDGTHFGDVLNFLRSGDLPPRERVRAVYKEAQYYAIGPLLEQLENMQPLKGEKVRQAFLGLMPYYKDHLERIVEIARLRAVQRKARFAKLKVCVFKEEMPITPYECPLLNSLRFERSESDGQLFEHHCEVDVSFGPWEAVADVYDLLHCLVTDLSAQGLTVDHQCIGVCDKHLVNHYYCKRPIYEFKITWW

SEQ ID NO: 286 - protein, 410 aa, Artificial Sequence
  LAMP2
MVCFRLFPVPGSGLVLVCLVLGAVRSYALELNLTDSENATCLYAKWQMNFTVRYETTNKTYKTVTISDHGTVTYNGSICGDDQNGPKIAVQFGPGFSWIANFTKAASTYSIDSVSFSYNTGDNTTFPDAEDKGILTVDELLAIRIPLNDLFRCNSLSTLEKNDVVQHYWDVLVQAFVQNGTVSTNEFLCDKDKTSTVAPTIHTTVPSPTTTPTPKEKPEAGTYSVNNGNDTCLLATMGLQLNITQDKVASVININPNTTHSTGSCRSHTALLRLNSSTIKYLDFVFAVKNENRFYLKEVNISMYLVNGSVFSIANNNLSYWDAPLGSSYMCNKEQTVSVSGAFQINTFDLRVQPFNVTQGKYSTAQDCSADDDNFLVPIAVGAALAGVLILVLLAYFIGLKHHHAGYEQF

SEQ ID NO: 287 - protein, 1011 aa, Artificial Sequence
  MAN2B1
MGAYARASGVCARGCLDSAGPWTMSRALRPPLPPLCFFLLLLAAAGARAGGYETCPTVQPNMLNVHLLPHTHDDVGWLKTVDQYFYGIKNDIQHAGVQYILDSVISALLADPTRRFIYVEIAFFSRWWHQQTNATQEVVRDLVRQGRLEFANGGWVMNDEAATHYGAIVDQMTLGLRFLEDTFGNDGRPRVAWHIDPFGHSREQASLFAQMGFDGFFFGRLDYQDKWVRMQKLEMEQVWRASTSLKPPTADLFTGVLPNGYNPPRNLCWDVLCVDQPLVEDPRSPEYNAKELVDYFLNVATAQGRYYRTNHTVMTMGSDFQYENANMWFKNLDKLIRLVNAQQAKGSSVHVLYSTPACYLWELNKANLTWSVKHDDFFPYADGPHQFWTGYFSSRPALKRYERLSYNFLQVCNQLEALVGLAANVGPYGSGDSAPLNEAMAVLQHHDAVSGTSRQHVANDYARQLAAGWGPCEVLLSNALARLRGFKDHFTFCQQLNISICPLSQTAARFQVIVYNPLGRKVNWMVRLPVSEGVFVVKDPNGRTVPSDVVIFPSSDSQAHPPELLFSASLPALGFSTYSVAQVPRWKPQARAPQPIPRRSWSPALTIENEHIRATFDPDTGLLMEIMNMNQQLLLPVRQTFFWYNASIGDNESDQASGAYIFRPNQQKPLPVSRWAQIHLVKTPLVQEVHQNFSAWCSQVVRLYPGQRHLELEWSVGPIPVGDTWGKEVISRFDTPLETKGRFYTDSNGREILERRRDYRPTWKLNQTEPVAGNYYPVNTRIYITDGNMQLTVLTDRSQGGSSLRDGSLELMVHRRLLKDDGRGVSEPLMENGSGAWVRGRHLVLLDTAQAAAAGHRLLAEQEVLAPQVVLAPGGGAAYNLGAPPRTQFSGLRRDLPPSVHLLTLASWGPEMVLLRLEHQFAVGEDSGRNLSAPVTLNLRDLFSTFTITRLQETTLVANQLREAASRLKWTTNTGPTPHQTPYQLDPANITLEPMEIRTFLASVQWKEVDG

SEQ ID NO: 288 - protein, 879 aa, Artificial Sequence
  MANBA
MRLHLLLLLALCGAGTTAAELSYSLRGNWSICNGNGSLELPGAVPGCVHSALFQQGLIQDSYYRFNDLNYRWVSLDNWTYSKEFKIPFEISKWQKVNLILEGVDTVSKILFNEVTIGETDNMFNRYSFDITNVVRDVNSIELRFQSAVLYAAQQSKAHTRYQVPPDCPPLVQKGECHVNFVRKEQCSFSWDWGPSFPTQGIWKDVRIEAYNICHLNYFTFSPIYDKSAQEWNLEIESTFDVVSSKPVGGQVIVAIPKLQTQQTYSIELQPGKRIVELFVNISKNITVETWWPHGHGNQTGYNMTVLFELDGGLNIEKSAKVYFRTVELIEEPIKGSPGLSFYFKINGFPIFLKGSNWIPADSFQDRVTSELLRLLLQSVVDANMNTLRVWGGGIYEQDEFYELCDELGIMVWQDFMFACALYPTDQGFLDSVTAEVAYQIKRLKSHPSIIIWSGNNENEEALMMNWYHISFTDRPIYIKDYVTLYVKNIRELVLAGDKSRPFITSSPTNGAETVAEAWVSQNPNSNYFGDVHFYDYISDCWNWKVFPKARFASEYGYQSWPSFSTLEKVSSTEDWSFNSKFSLHRQHHEGGNKQMLYQAGLHFKLPQSTDPLRTFKDTIYLTQVMQAQCVKTETEFYRRSRSEIVDQQGHTMGALYWQLNDIWQAPSWASLEYGGKWKMLHYFAQNFFAPLLPVGFENENTFYIYGVSDLHSDYSMTLSVRVHTWSSLEPVCSRVTERFVMKGGEAVCLYEEPVSELLRRCGNCTRESCVVSFYLSADHELLSPTNYHFLSSPKEAVGLCKAQITAIISQQGDIFVFDLETSAVAPFVWLDVGSIPGRFSDNGFLMTEKTRTILFYPWEPTSKNELEQSFHVTSLTDIY

SEQ ID NO: 289 - protein, 580 aa, Artificial Sequence
  MCOLN1
MTAPAGPRGSETERLLTPNPGYGTQAGPSPAPPTPPEEEDLRRRLKYFFMSPCDKFRAKGRKPCKLMLQVVKILVVTVQLILFGLSNQLAVTFREENTIAFRHLFLLGYSDGADDTFAAYTREQLYQAIFHAVDQYLALPDVSLGRYAYVRGGGDPWTNGSGLALCQRYYHRGHVDPANDTFDIDPMVVTDCIQVDPPERPPPPPSDDLTLLESSSSYKNLTLKFHKLVNVTIHFRLKTINLQSLINNEIPDCYTFSVLITFDNKAHSGRIPISLETQAHIQECKHPSVFQHGDNSFRLLFDVVVILTCSLSFLLCARSLLRGFLLQNEFVGFMWRQRGRVISLWERLEFVNGWYILLVTSDVLTISGTIMKIGIEAKNLASYDVCSILLGTSTLLVWVGVIRYLTFFHNYNILIATLRVALPSVMRFCCCVAVIYLGYCFCGWIVLGPYHVKFRSLSMVSECLFSLINGDDMFVTFAAMQAQQGRSSLVWLFSQLYLYSFISLFIYMVLSLFIALITGAYDTIKHPGGAGAEESELQAYIAQCQDSPTSGKFRRGSGSACSLLCCCGRDPSEEHSLLVN

SEQ ID NO: 290 - protein, 518 aa, Artificial Sequence
  MFSD8
MAGLRNESEQEPLLGDTPGSREWDILETEEHYKSRWRSIRILYLTMFLSSVGFSVVMMSIWPYLQKIDPTADTSFLGWVIASYSLGQMVASPIFGLWSNYRPRKEPLIVSILISVAANCLYAYLHIPASHNKYYMLVARGLLGIGAGNVAVVRSYTAGATSLQERTSSMANISMCQALGFILGPVFQTCFTFLGEKGVTWDVIKLQINMYTTPVLLSAFLGILNIILILAILREHRVDDSGRQCKSINFEEASTDEAQVPQGNIDQVAVVAINVLFFVTLFIFALFETIITPLTMDMYAWTQEQAVLYNGIILAALGVEAVVIFLGVKLLSKKIGERAILLGGLIVVWVGFFILLPWGNQFPKIQWEDLHNNSIPNTTFGEIIIGLWKSPMEDDNERPTGCSIEQAWCLYTPVIHLAQFLTSAVLIGLGYPVCNLMSYTLYSKILGPKPQGVYMGWLTASGSGARILGPMFISQVYAHWGPRWAFSLVCGIIVLTITLLGVVYKRLIALSVRYGRIQE

SEQ ID NO: 291 - protein, 411 aa, Artificial Sequence
  NAGA
MLLKTVLLLGHVAQVLMLDNGLLQTPPMGWLAWERFRCNINCDEDPKNCISEQLFMEMADRMAQDGWRDMGYTYLNIDDCWIGGRDASGRLMPDPKRFPHGIPFLADYVHSLGLKLGIYADMGNFTCMGYPGTTLDKVVQDAQTFAEWKVDMLKLDGCFSTPEERAQGYPKMAAALNATGRPIAFSCSWPAYEGGLPPRVNYSLLADICNLWRNYDDIQDSWWSVLSILNWFVEHQDILQPVAGPGHWNDPDMLLIGNFGLSLEQSRAQMALWTVLAAPLLMSTDLRTISAQNMDILQNPLMIKINQDPLGIQGRRIHKEKSLIEVYMRPLSNKASALVFFSCRTDMPYRYHSSLGQLNFTGSVIYEAQDVYSGDIISGLRDETNFTVIINPSGVVMWYLYPIKNLEMSQQ

SEQ ID NO: 292 - protein, 743 aa, Artificial Sequence
  NAGLU
MEAVAVAAAVGVLLLAGAGGAAGDEAREAAAVRALVARLLGPGPAADFSVSVERALAAKPGLDTYSLGGGGAARVRVRGSTGVAAAAGLHRYLRDFCGCHVAWSGSQLRLPRPLPAVPGELTEATPNRYRYYQNVCTQSYSFVWWDWARWEREIDWMALNGINLALAWSGQEAIWQRVYLALGLTQAEINEFFTGPAFLAWGRMGNLHTWDGPLPPSWHIKQLYLQHRVLDQMRSFGMTPVLPAFAGHVPEAVTRVFPQVNVTKMGSWGHFNCSYSCSFLLAPEDPIFPIIGSLFLRELIKEFGTDHIYGADTFNEMQPPSSEPSYLAAATTAVYEAMTAVDTEAVWLLQGWLFQHQPQFWGPAQIRAVLGAVPRGRLLVLDLFAESQPVYTRTASFQGQPFIWCMLHNFGGNHGLFGALEAVNGGPEAARLFPNSTMVGTGMAPEGISQNEVVYSLMAELGWRKDPVPDLAAWVTSFAARRYGVSHPDAGAAWRLLLRSVYNCSGEACRGHNRSPLVRRPSLQMNTSIWYNRSDVFEAWRLLLTSAPSLATSPAFRYDLLDLTRQAVQELVSLYYEEARSAYLSKELASLLRAGGVLAYELLPALDEVLASDSRFLLGSWLEQARAAAVSEAEADFYEQNSRYQLTLWGPEGNILDYANKQLAGLVANYYTPRWRLFLEALVDSVAQGIPFQQHQFDKNVFQLEQAFVLSKQRYPSQPRGDTVDLAKKIFLKYYPRWVAGSW

SEQ ID NO: 293 - protein, 415 aa, Artificial Sequence
  NEU1
MTGERPSTALPDRRWGPRILGFWGGCRVWVFAAIFLLLSLAASWSKAENDFGLVQPLVTMEQLLWVSGRQIGSVDTFRIPLITATPRGTLLAFAEARKMSSSDEGAKFIALRRSMDQGSTWSPTAFIVNDGDVPDGLNLGAVVSDVETGVVFLFYSLCAHKAGCQVASTMLVWSKDDGVSWSTPRNLSLDIGTEVFAPGPGSGIQKQREPRKGRLIVCGHGTLERDGVFCLLSDDHGASWRYGSGVSGIPYGQPKQENDFNPDECQPYELPDGSVVINARNQNNYHCHCRIVLRSYDACDTLRPRDVTFDPELVDPVVAAGAVVTSSGIVFFSNPAHPEFRVNLTLRWSFSNGTSWRKETVQLWPGPSGYSSLATLEGSMDGEEQAPQLYVLYEKGRNHYTESISVAKISVYGTL

SEQ ID NO: 294 - protein, 1278 aa, Artificial Sequence
  NPC1
MTARGLALGLLLLLLCPAQVFSQSCVWYGECGIAYGDKRYNCEYSGPPKPLPKDGYDLVQELCPGFFFGNVSLCCDVRQLQTLKDNLQLPLQFLSRCPSCFYNLLNLFCELTCSPRQSQFLNVTATEDYVDPVTNQTKTNVKELQYYVGQSFANAMYNACRDVEAPSSNDKALGLLCGKDADACNATNWIEYMFNKDNGQAPFTITPVFSDFPVHGMEPMNNATKGCDESVDEVTAPCSCQDCSIVCGPKPQPPPPPAPWTILGLDAMYVIMWITYMAFLLVFFGAFFAVWCYRKRYFVSEYTPIDSNIAFSVNASDKGEASCCDPVSAAFEGCLRRLFTRWGSFCVRNPGCVIFFSLVFITACSSGLVFVRVTTNPVDLWSAPSSQARLEKEYFDQHFGPFFRTEQLIIRAPLTDKHIYQPYPSGADVPFGPPLDIQILHQVLDLQIAIENITASYDNETVTLQDICLAPLSPYNTNCTILSVLNYFQNSHSVLDHKKGDDFFVYADYHTHFLYCVRAPASLNDTSLLHDPCLGTFGGPVFPWLVLGGYDDQNYNNATALVITFPVNNYYNDTEKLQRAQAWEKEFINFVKNYKNPNLTISFTAERSIEDELNRESDSDVFTVVISYAIMFLYISLALGHMKSCRRLLVDSKVSLGIAGILIVLSSVACSLGVFSYIGLPLTLIVIEVIPFLVLAVGVDNIFILVQAYQRDERLQGETLDQQLGRVLGEVAPSMFLSSFSETVAFFLGALSVMPAVHTFSLFAGLAVFIDFLLQITCFVSLLGLDIKRQEKNRLDIFCCVRGAEDGTSVQASESCLFRFFKNSYSPLLLKDWMRPIVIAIFVGVLSFSIAVLNKVDIGLDQSLSMPDDSYMVDYFKSISQYLHAGPPVYFVLEEGHDYTSSKGQNMVCGGMGCNNDSLVQQIFNAAQLDNYTRIGFAPSSWIDDYFDWVKPQSSCCRVDNITDQFCNASVVDPACVRCRPLTPEGKQRPQGGDFMRFLPMFLSDNPNPKCGKGGHAAYSSAVNILLGHGTRVGATYFMTYHTVLQTSADFIDALKKARLIASNVTETMGINGSAYRVFPYSVFYVFYEQYLTIIDDTIFNLGVSLGAIFLVTMVLLGCELWSAVIMCATIAMVLVNMFGVMWLWGISLNAVSLVNLVMSCGISVEFCSHITRAFTVSMKGSRVERAEEALAHMGSSVFSGITLTKFGGIVVLAFAKSQIFQIFYFRMYLAMVLLGATHGLIFLPVLLSYIGPSVNKAKSCATEERYKGTERERLLNF

SEQ ID NO: 295 - protein, 151 aa, Artificial Sequence
  NPC2
MRFLAATFLLLALSTAAQAEPVQFKDCGSVDGVIKEVNVSPCPTQPCQLSKGQSYSVNVTFTSNIQSKSSKAVVHGILMGVPVPFPIPEPDGCKSGINCPIQKDKTYSYLNKLPVKSEYPSIKLVVEWQLQDDKNQSLFCWEIPVQIVSHL

SEQ ID NO: 296 - protein, 502 aa, Artificial Sequence
  SGSH
MSCPVPACCALLLVLGLCRARPRNALLLLADDGGFESGAYNNSAIATPHLDALARRSLLFRNAFTSVSSCSPSRASLLTGLPQHQNGMYGLHQDVHHFNSFDKVRSLPLLLSQAGVRTGIIGKKHVGPETVYPFDFAYTEENGSVLQVGRNITRIKLLVRKFLQTQDDRPFFLYVAFHDPHRCGHSQPQYGTFCEKFGNGESGMGRIPDWTPQAYDPLDVLVPYFVPNTPAARADLAAQYTTVGRMDQGVGLVLQELRDAGVLNDTLVIFTSDNGIPFPSGRTNLYWPGTAEPLLVSSPEHPKRWGQVSEAYVSLLDLTPTILDWFSIPYPSYAIFGSKTIHLTGRSLLPALEAEPLWATVFGSQSHHEVTMSYPMRSVQHRHFRLVHNLNFKMPFPIDQDFYVSPTFQDLLNRTTAGQPTGWYKDLRHYYYRARWELYDRSRDPHETQNLATDPRFAQLLEMLRDQLAKWQWETHDPWVCAPDGVLEEKLSPQCQPLHNEL

SEQ ID NO: 297 - protein, 306 aa, Artificial Sequence
  PPT1
MASPGCLWLLAVALLPWTCASRALQHLDPPAPLPLVIWHGMGDSCCNPLSMGAIKKMVEKKIPGIYVLSLEIGKTLMEDVENSFFLNVNSQVTTVCQALAKDPKLQQGYNAMGFSQGGQFLRAVAQRCPSPPMINLISVGGQHQGVFGLPRCPGESSHICDFIRKTLNAGAYSKVVQERLVQAEYWHDPIKEDVYRNHSIFLADINQERGINESYKKNLMALKKFVMVKFLNDSIVDPVDSEWFGFYRSGQAKETIPLQETSLYTQDRLGLKEMDNAGQLVFLATEGDHLQLSEEWFYAHIIPFLG

SEQ ID NO: 298 - protein, 524 aa, Artificial Sequence
  PSAP
MYALFLLASLLGAALAGPVLGLKECTRGSAVWCQNVKTASDCGAVKHCLQTVWNKPTVKSLPCDICKDVVTAAGDMLKDNATEEEILVYLEKTCDWLPKPNMSASCKEIVDSYLPVILDIIKGEMSRPGEVCSALNLCESLQKHLAELNHQKQLESNKIPELDMTEVVAPFMANIPLLLYPQDGPRSKPQPKDNGDVCQDCIQMVTDIQTAVRTNSTFVQALVEHVKEECDRLGPGMADICKNYISQYSEIAIQMMMHMQPKEICALVGFCDEVKEMPMQTLVPAKVASKNVIPALELVEPIKKHEVPAKSDVYCEVCEFLVKEVTKLIDNNKTEKEILDAFDKMCSKLPKSLSEECQEVVDTYGSSILSILLEEVSPELVCSMLHLCSGTRLPALTVHVTQPKDGGFCEVCKKLVGYLDRNLEKNSTKQEILAALEKGCSFLPDPYQKQCDQFVAEYEPVLIEILVEVMDPSFVCLKIGACPSAHKPLLGTEKCIWGPSYWCQNTETAAQCNAVEHCKRHVWN

SEQ ID NO: 299 - protein, 495 aa, Artificial Sequence
  SLC17A5
MRSPVRDLARNDGEESTDRTPLLPGAPRAEAAPVCCSARYNLAILAFFGFFIVYALRVNLSVALVDMVDSNTTLEDNRTSKACPEHSAPIKVHHNQTGKKYQWDAETQGWILGSFFYGYIITQIPGGYVASKIGGKMLLGFGILGTAVLTLFTPIAADLGVGPLIVLRALEGLGEGVTFPAMHAMWSSWAPPLERSKLLSISYAGAQLGTVISLPLSGIICYYMNWTYVFYFFGTIGIFWFLLWIWLVSDTPQKHKRISHYEKEYILSSLRNQLSSQKSVPWVPILKSLPLWAIVVAHFSYNWTFYTLLTLLPTYMKEILRFNVQENGFLSSLPYLGSWLCMILSGQAADNLRAKWNFSTLCVRRIFSLIGMIGPAVFLVAAGFIGCDYSLAVAFLTISTTLGGFCSSGFSINHLDIAPSYAGILLGITNTFATIPGMVGPVIAKSLTPDNTVGEWQTVFYIAAAINVFGAIFFTLFAKGEVQNWALNDHHGHRH

SEQ ID NO: 300 - protein, 631 aa, Artificial Sequence
  SMPD1
MPRYGASLRQSCPRSGREQGQDGTAGAPGLLWMGLVLALALALALALALSDSRVLWAPAEAHPLSPQGHPARLHRIVPRLRDVFGWGNLTCPICKGLFTAINLGLKKEPNVARVGSVAIKLCNLLKIAPPAVCQSIVHLFEDDMVEVWRRSVLSPSEACGLLLGSTCGHWDIFSSWNISLPTVPKPPPKPPSPPAPGAPVSRILFLTDLHWDHDYLEGTDPDCADPLCCRRGSGLPPASRPGAGYWGEYSKCDLPLRTLESLLSGLGPAGPFDMVYWTGDIPAHDVWHQTRQDQLRALTTVTALVRKFLGPVPVYPAVGNHESTPVNSFPPPFIEGNHSSRWLYEAMAKAWEPWLPAEALRTLRIGGFYALSPYPGLRLISLNMNFCSRENFWLLINSTDPAGQLQWLVGELQAAEDRGDKVHIIGHIPPGHCLKSWSWNYYRIVARYENTLAAQFFGHTHVDEFEVFYDEETLSRPLAVAFLAPSATTYIGLNPGYRVYQIDGNYSGSSHVVLDHETYILNLTQANIPGAIPHWQLLYRARETYGLPNTLPTAWHNLVYRMRGDMQLFQTFWFLYHKGHPPSEPCGTPCRLATLCAQLSARADSPALCRHLMPDGSLPEAQSLWPRPLFC

SEQ ID NO: 301 - protein, 374 aa, Artificial Sequence
  SUMF1
MAAPALGLVCGRCPELGLVLLLLLLSLLCGAAGSQEAGTGAGAGSLAGSCGCGTPQRPGAHGSSAAAHRYSREANAPGPVPGERQLAHSKMVPIPAGVFTMGTDDPQIKQDGEAPARRVTIDAFYMDAYEVSNTEFEKFVNSTGYLTEAEKFGDSFVFEGMLSEQVKTNIQQAVAAAPWWLPVKGANWRHPEGPDSTILHRPDHPVLHVSWNDAVAYCTWAGKRLPTEAEWEYSCRGGLHNRLFPWGNKLQPKGQHYANIWQGEFPVTNTGEDGFQGTAPVDAFPPNGYGLYNIVGNAWEWTSDWWTVHHSVEETLNPKGPPSGKDRVKKGGSYMCHRSYCYRYRCAARSQNTPDSSASNLGFRCAADRLPTMD

SEQ ID NO: 302 - protein, 563 aa, Artificial Sequence
  TPP1
MGLQACLLGLFALILSGKCSYSPEPDQRRTLPPGWVSLGRADPEEELSLTFALRQQNVERLSELVQAVSDPSSPQYGKYLTLENVADLVRPSPLTLHTVQKWLLAAGAQKCHSVITQDFLTCWLSIRQAELLLPGAEFHHYVGGPTETHVVRSPHPYQLPQALAPHVDFVGGLHRFPPTSSLRQRPEPQVTGTVGLHLGVTPSVIRKRYNLTSQDVGSGTSNNSQACAQFLEQYFHDSDLAQFMRLFGGNFAHQASVARVVGQQGRGRAGIEASLDVQYLMSAGANISTWVYSSPGRHEGQEPFLQWLMLLSNESALPHVHTVSYGDDEDSLSSAYIQRVNTELMKAAARGLTLLFASGDSGAGCWSVSGRHQFRPTFPASSPYVTTVGGTSFQEPFLITNEIVDYISGGGFSNVFPRPSYQEEAVTKFLSSSPHLPPSSYFNASGRAYPDVAALSDGYWVVSNRVPIPWVSGTSASTPVFGGILSLINEHRILSGRPPLGFLNPRLYQQHGAGLFDVTRGCHESCLDEEVEGQGFCSGPGWDPVTGWGTPNFPALLKTLLNP

SEQ ID NO: 303 - protein, 432 aa, Artificial Sequence
  AHCY
MSDKLPYKVADIGLAAWGRKALDIAENEMPGLMRMRERYSASKPLKGARIAGCLHMTVETAVLIETLVTLGAEVQWSSCNIFSTQDHAAAAIAKAGIPVYAWKGETDEEYLWCIEQTLYFKDGPLNMILDDGGDLTNLIHTKYPQLLPGIRGISEETTTGVHNLYKMMANGILKVPAINVNDSVTKSKFDNLYGCRESLIDGIKRATDVMIAGKVAVVAGYGDVGKGCAQALRGFGARVIITEIDPINALQAAMEGYEVTTMDEACQEGNIFVTTTGCIDIILGRHFEQMKDDAIVCNIGHFDVEIDVKWLNENAVEKVNIKPQVDRYRLKNGRRIILLAEGRLVNLGCAMGHPSFVMSNSFTNQVMAQIELWTHPDKYPVGVHFLPKKLDEAVAEAHLGKLNVKLTKLTEKQAQYLGMSCDGPFKPDHYRY

SEQ ID NO: 304 - protein, 295 aa, Artificial Sequence
  GNMT
MVDSVYRTRSLGVAAEGLPDQYADGEAARVWQLYIGDTRSRTAEYKAWLLGLLRQHGCQRVLDVACGTGVDSIMLVEEGFSVTSVDASDKMLKYALKERWNRRHEPAFDKWVIEEANWMTLDKDVPQSAEGGFDAVICLGNSFAHLPDCKGDQSEHRLALKNIASMVRAGGLLVIDHRNYDHILSTGCAPPGKNIYYKSDLTKDVTTSVLIVNNKAHMVTLDYTVQVPGAGQDGSPGLSKFRLSYYPHCLASFTELLQAAFGGKCQHSVLGDFKPYKPGQTYIPCYFIHVLKRTD

SEQ ID NO: 305 - protein, 395 aa, Artificial Sequence
  MAT1A
MNGPVDGLCDHSLSEGVFMFTSESVGEGHPDKICDQISDAVLDAHLKQDPNAKVACETVCKTGMVLLCGEITSMAMVDYQRVVRDTIKHIGYDDSAKGFDFKTCNVLVALEQQSPDIAQCVHLDRNEEDVGAGDQGLMFGYATDETEECMPLTIILAHKLNARMADLRRSGLLPWLRPDSKTQVTVQYMQDNGAVIPVRIHTIVISVQHNEDITLEEMRRALKEQVIRAVVPAKYLDEDTVYHLQPSGRFVIGGPQGDAGVTGRKIIVDTYGGWGAHGGGAFSGKDYTKVDRSAAYAARWVAKSLVKAGLCRRVLVQVSYAIGVAEPLSISIFTYGTSQKTERELLDVVHKNFDLRPGVIVRDLDLKKPIYQKTACYGHFGRSEFPWEVPRKLVF

SEQ ID NO: 306 - protein, 250 aa, Artificial Sequence
  GCH1
MEKGPVRAPAEKPRGARCSNGFPERDPPRPGPSRPAEKPPRPEAKSAQPADGWKGERPRSEEDNELNLPNLAAAYSSILSSLGENPQRQGLLKTPWRAASAMQFFTKGYQETISDVLNDAIFDEDHDEMVIVKDIDMFSMCEHHLVPFVGKVHIGYLPNKQVLGLSKLARIVEIYSRRLQVQERLTKQIAVAITEALRPAGVGVVVEATHMCMVMRGVQKMNSKTVTSTMLGVFREDPKTREEFLTLIRS

SEQ ID NO: 307 - protein, 104 aa, Artificial Sequence
  PCBD1
MAGKAHRLSAEERDQLLPNLRAVGWNELEGRDAIFKQFHFKDFNRAFGFMTRVALQAEKLDHHPEWFNVYNKVHITLSTHECAGLSERDINLASFIEQVAVSMT

SEQ ID NO: 308 - protein, 145 aa, Artificial Sequence
  PTS
MSTEGGGRRCQAQVSRRISFSASHRLYSKFLSDEENLKLFGKCNNPNGHGHNYKVVVTVHGEIDPATGMVMNLADLKKYMEEAIMQPLDHKNLDMDVPYFADVVSTTENVAVYIWDNLQKVLPVGVLYKVKVYETDNNIVVYKGE

SEQ ID NO: 309 - protein, 244 aa, Artificial Sequence
  QDPR
MAAAAAAGEARRVLVYGGRGALGSRCVQAFRARNWWVASVDVVENEEASASIIVKMTDSFTEQADQVTAEVGKLLGEEKVDAILCVAGGWAGGNAKSKSLFKNCDLMWKQSIWTSTISSHLATKHLKEGGLLTLAGAKAALDGTPGMIGYGMAKGAVHQLCQSLAGKNSGMPPGAAAIAVLPVTLDTPMNRKSMPEADFSSWTPLEFLVETFHDWITGKNRPSSGSLIQVVTTEGRTELTPAYF

SEQ ID NO: 310 - protein, 261 aa, Artificial Sequence
  SPR
MEGGLGRAVCLLTGASRGFGRTLAPLLASLLSPGSVLVLSARNDEALRQLEAELGAERSGLRVVRVPADLGAEAGLQQLLGALRELPRPKGLQRLLLINNAGSLGDVSKGFVDLSDSTQVNNYWALNLTSMLCLTSSVLKAFPDSPGLNRTVVNISSLCALQPFKGWALYCAGKAARDMLFQVLALEEPNVRVLNYAPGPLDTDMQQLARETSVDPDMRKGLQELKAKGKLVDCKVSAQKLLSLLEKDEFKSGAHVDFYDK

SEQ ID NO: 311 - protein, 198 aa, Artificial Sequence
  DNAJC12
MDAILNYRSEDTEDYYTLLGCDELSSVEQILAEFKVRALECHPDKHPENPKAVETFQKLQKAKEILTNEESRARYDHWRRSQMSMPFQQWEALNDSVKTSMHWVVRGKKDLMLEESDKTHTTKMENEECNEQRERKKEELASTAEKTEQKEPKPLEKSVSPQNSDSSGFADVNGWHLRFRWSKDAPSELLRKFRNYEI

SEQ ID NO: 312 - protein, 563 aa, Artificial Sequence
  ALDH4A1
MLLPAPALRRALLSRPWTGAGLRWKHTSSLKVANEPVLAFTQGSPERDALQKALKDLKGRMEAIPCVVGDEEVWTSDVQYQVSPFNHGHKVAKFCYADKSLLNKAIEAALAARKEWDLKPIADRAQIFLKAADMLSGPRRAEILAKTMVGQGKTVIQAEIDAAAELIDFFRFNAKYAVELEGQQPISVPPSTNSTVYRGLEGFVAAISPFNFTAIGGNLAGAPALMGNVVLWKPSDTAMLASYAVYRILREAGLPPNIIQFVPADGPLFGDTVTSSEHLCGINFTGSVPTFKHLWKQVAQNLDRFHTFPRLAGECGGKNFHFVHRSADVESVVSGTLRSAFEYGGQKCSACSRLYVPHSLWPQIKGRLLEEHSRIKVGDPAEDFGTFFSAVIDAKSFARIKKWLEHARSSPSLTILAGGKCDDSVGYFVEPCIVESKDPQEPIMKEEIFGPVLSVYVYPDDKYKETLQLVDSTTSYGLTGAVFSQDKDVVQEATKVLRNAAGNFYINDKSTGSIVGQQPFGGARASGTNDKPGGPHYILRWTSPQVIKETHKPLGDWSYAYMQ

SEQ ID NO: 313 - protein, 600 aa, Artificial Sequence [sequence omitted]

SEQ ID NO: 314 - protein, 393 aa, Artificial Sequence
  HPD
MTTYSDKGAKPERGRFLHFHSVTFWVGNAKQAASFYCSKMGFEPLAYRGLETGSREVVSHVIKQGKIVFVLSSALNPWNKEMGDHLVKHGDGVKDIAFEVEDCDYIVQKARERGAKIMREPWVEQDKFGKVKFAVLQTYGDTTHTLVEKMNYIGQFLPGYEAPAFMDPLLPKLPKCSLEMIDHIVGNQPDQEMVSASEWYLKNLQFHRFWSVDDTQVHTEYSSLRSIVVANYEESIKMPINEPAPGKKKSQIQEYVDYNGGAGVQHIALKTEDIITAIRHLRERGLEFLSVPSTYYKQLREKLKTAKIKVKENIDALEELKILVDYDEKGYLLQIFTKPVQDRPTLFLEVIQRHNHQGFGAGNFNSLFKAFEEEQNLRGNLTNMETNGVVPGM

SEQ ID NO: 315 - protein, 536 aa, Artificial Sequence
  GBA
MEFSSPSREECPKPLSRVSIMAGSLTGLLLLQAVSWASGARPCIPKSFGYSSVVCVCNATYCDSFDPPTFPALGTFSRYESTRSGRRMELSMGPIQANHTGTGLLLTLQPEQKFQKVKGFGGAMTDAAALNILALSPPAQNLLLKSYFSEEGIGYNIIRVPMASCDFSIRTYTYADTPDDFQLHNFSLPEEDTKLKIPLIHRALQLAQRPVSLLASPWTSPTWLKTNGAVNGKGSLKGQPGDIYHQTWARYFVKFLDAYAEHKLQFWAVTAENEPSAGLLSGYPFQCLGFTPEHQRDFIARDLGPTLANSTHHNVRLLMLDDQRLLLPHWAKVVLTDPEAAKYVHGIAVHWYLDFLAPAKATLGETHRLFPNTMLFASEACVGSKFWEQSVRLGSWDRGMQYSHSIITNLLYHVVGWTDWNLALNPEGGPNWVRNFVDSPIIVDITKDTFYKQPMFYHLGHFSKFIPEGSQRVGLVASQKNDLDAVALMHPDGSAVVVVLNRSSKDVPLTIKDPAVGFLETISPGYSIHTYLWRRQ

SEQ ID NO: 316 - protein, 445 aa, Artificial Sequence
  HGD
MAELKYISGFGNECSSEDPRCPGSLPEGQNNPQVCPYNLYAEQLSGSAFTCPRSTNKRSWLYRILPSVSHKPFESIDEGQVTHNWDEVDPDPNQLRWKPFEIPKASQKKVDFVSGLHTLCGAGDIKSNNGLAIHIFLCNTSMENRCFYNSDGDFLIVPQKGNLLIYTEFGKMLVQPNEICVIQRGMRFSIDVFEETRGYILEVYGVHFELPDLGPIGANGLANPRDFLIPIAWYEDRQVPGGYTVINKYQGKLFAAKQDVSPFNVVAWHGNYTPYKYNLKNFMVINSVAFDHADPSIFTVLTAKSVRPGVAIADFVIFPPRWGVADKTFRPPYYHRNCMSEFMGLIRGHYEAKQGGFLPGGGSLHSTMTPHGPDADCFEKASKVKLAPERIADGTMAFMFESSLSLAVTKWGLKASRCLDENYHKCWEPLKSHFTPNSRNPAEPN

SEQ ID NO: 317 - protein, 453 aa, Artificial Sequence
  AMN
MGVLGRVLLWLQLCALTQAVSKLWVPNTDFDVAANWSQNRTPCAGGAVEFPADKMVSVLVQEGHAVSDMLLPLDGELVLASGAGFGVSDVGSHLDCGAGEPAVFRDSDRFSWHDPHLWRSGDEAPGLFFVDAERVPCRHDDVFFPPSASFRVGLGPGASPVRVRSISALGRTFTRDEDLAVFLASRAGRLRFHGPGALSVGPEDCADPSGCVCGNAEAQPWICAALLQPLGGRCPQAACHSALRPQGQCCDLCGAVVLLTHGPAFDLERYRARILDTFLGLPQYHGLQVAVSKVPRSSRLREADTEIQVVLVENGPETGGAGRLARALLADVAENGEALGVLEATMRESGAHVWGSSAAGLAGGVAAAVLLALLVLLVAPPLLRRAGRLRWRRHEAAAPAGAPLGFRNPVFDVTASEELPLPRRLSLVPKAAADSTSHSYFVNPLFAGAEAEA

SEQ ID NO: 318 - protein, 282 aa, Artificial Sequence
  CD320
MSGGWMAQVGAWRTGALGLALLLLLGLGLGLEAAASPLSTPTSAQAAGPSSGSCPPTKFQCRTSGLCVPLTWRCDRDLDCSDGSDEEECRIEPCTQKGQCPPPPGLPCPCTGVSDCSGGTDKKLRNCSRLACLAGELRCTLSDDCIPLTWRCDGHPDCPDSSDELGCGTNEILPEGDATTMGPPVTLESVTSLRNATTMGPPVTLESVPSVGNATSSSAGDQSGSPTAYGVIAAAAVLSASLVTATLLLLSWLRAQERLRPLGLLVAMKESLLLSEQKTSLP

SEQ ID NO: 319 - protein, 3623 aa, Artificial Sequence
  CUBN
MMNMSLPFLWSLLTLLIFAEVNGEAGELELQRQKRSINLQQPRMATERGNLVFLTGSAQNIEFRTGSLGKIKLNDEDLSECLHQIQKNKEDIIELKGSAIGLPQNISSQIYQLNSKLVDLERKFQGLQQTVDKKVCSSNPCQNGGTCLNLHDSFFCICPPQWKGPLCSADVNECEIYSGTPLSCQNGGTCVNTMGSYSCHCPPETYGPQCASKYDDCEGGSVARCVHGICEDLMREQAGEPKYSCVCDAGWMFSPNSPACTLDRDECSFQPGPCSTLVQCFNTQGSFYCGACPTGWQGNGYICEDINECEINNGGCSVAPPVECVNTPGSSHCQACPPGYQGDGRVCTLTDICSVSNGGCHPDASCSSTLGSLPLCTCLPGYTGNGYGPNGCVQLSNICLSHPCLNGQCIDTVSGYFCKCDSGWTGVNCTENINECLSNPCLNGGTCVDGVDSFSCECTRLWTGALCQVPQQVCGESLSGINGSFSYRSPDVGYVHDVNCFWVIKTEMGKVLRITFTFFRLESMDNCPHEFLQVYDGDSSSAFQLGRFCGSSLPHELLSSDNALYFHLYSEHLRNGRGFTVRWETQQPECGGILTGPYGSIKSPGYPGNYPPGRDCVWIVVTSPDLLVTFTFGTLSLEHHDDCNKDYLEIRDGPLYQDPLLGKFCTTFSVPPLQTTGPFARIHFHSDSQISDQGFHITYLTSPSDLRCGGNYTDPEGELFLPELSGPFTHTRQCVYMMKQPQGEQIQINFTHVELQCQSDSSQNYIEVRDGETLLGKVCGNGTISHIKSITNSVWIRFKIDASVEKASFRAVYQVACGDELTGEGVIRSPFFPNVYPGERTCRWTIHQPQSQVILLNFTVFEIGSSAHCETDYVEIGSSSILGSPENKKYCGTDIPSFITSVYNFLYVTFVKSSSTENHGFMAKFSAEDLACGEILTESTGTIQSPGHPNVYPHGINCTWHILVQPNHLIHLMFETFHLEFHYNCTNDYLEVYDTDSETSLGRYCGKSIPPSLTSSGNSLMLVFVTDSDLAYEGFLINYEAISAATACLQDYTDDLGTFTSPNFPNNYPNNWECIYRITVRTGQLIAVHFTNFSLEEAIGNYYTDFLEIRDGGYEKSPLLGIFYGSNLPPTIISHSNKLWLKFKSDQIDTRSGFSAYWDGSSTGCGGNLTTSSGTFISPNYPMPYYHSSECYWWLKSSHGSAFELEFKDFHLEHHPNCTLDYLAVYDGPSSNSHLLTQLCGDEKPPLIRSSGDSMFIKLRTDEGQQGRGFKAEYRQTCENVVIVNQTYGILESIGYPNPYSENQHCNWTIRATTGNTVNYTFLAFDLEHHINCSTDYLELYDGPRQMGRYCGVDLPPPGSTTSSKLQVLLLTDGVGRREKGFQMQWFVYGCGGELSGATGSFSSPGFPNRYPPNKECIWYIRTDPGSSIQLTIHDFDVEYHSRCNFDVLEIYGGPDFHSPRIAQLCTQRSPENPMQVSSTGNELAIRFKTDLSINGRGFNASWQAVTGGCGGIFQAPSGEIHSPNYPSPYRSNTDCSWVIRVDRNHRVLLNFTDFDLEPQDSCIMAYDGLSSTMSRLARTCGREQLANPIVSSGNSLFLRFQSGPSRQNRGFRAQFRQACGGHILTSSFDTVSSPRFPANYPNNQNCSWIIQAQPPLNHITLSFTHFELERSTTCARDFVEILDGGHEDAPLRGRYCGTDMPHPITSFSSALTLRFVSDSSISAGGFHTTVTASVSACGGTFYMAEGIFNSPGYPDIYPPNVECVWNIVSSPGNRLQLSFISFQLEDSQDCSRDFVEIREGNATGHLVGRYCGNSFPLNYSSIVGHTLWVRFISDGSGSGTGFQATFMKIFGNDNIVGTHGKVASPFWPENYPHNSNYQWTVNVNASHVVHGRILEMDIEEIQNCYYDKLRIYDGPSIHARLIGAYCGTQTESFSSTGNSLTFHFYSDSSISGKGFLLEWFAVDAPDGVLPTIAPGACGGFLRTGDAPVFLFSPGWPDSYSNRVDCTWLIQAPDSTVELNILSLDIESHRTCAYDSLVIRDGDNNLAQQLAVLCGREIPGPIRSTGEYMFIRFTSDSSVTRAGFNASFHKSCGGYLHADRGIITSPKYPETYPSNLNCSWHVLVQSGLTIAVHFEQPFQIPNGDSSCNQGDYLVLRNGPDICSPPLGPPGGNGHFCGSHASSTLFTSDNQMFVQFISDHSNEGQGFKIKYEAKSLACGGNVYIHDADSAGYVTSPNHPHNYPPHADCIWILAAPPETRIQLQFEDRFDIEVTPNCTSNYLELRDGVDSDAPILSKFCGTSLPSSQWSSGEVMYLRFRSDNSPTHVGFKAKYSIAQCGGRVPGQSGVVESIGHPTLPYRDNLFCEWHLQGLSGHYLTISFEDFNLQNSSGCEKDFVEIWDNHTSGNILGRYCGNTIPDSIDTSSNTAVVRFVTDGSVTASGFRLRFESSMEECGGDLQGSIGTFTSPNYPNPNPHGRICEWRITAPEGRRITLMFNNLRLATHPSCNNEHVIVFNGIRSNSPQLEKLCSSVNVSNEIKSSGNTMKVIFFTDGSRPYGGFTASYTSSEDAVCGGSLPNTPEGNFTSPGYDGVRNYSRNLNCEWTLSNPNQGNSSISIHFEDFYLESHQDCQFDVLEFRVGDADGPLMWRLCGPSKPTLPLVIPYSQVWIHFVTNERVEHIGFHAKYSFTDCGGIQIGDSGVITSPNYPNAYDSLTHCSSLLEAPQGHTITLTFSDFDIEPHTTCAWDSVTVRNGGSPESPIIGQYCGNSNPRTIQSGSNQLVVTFNSDHSLQGGGFYATWNTQTLGCGGIFHSDNGTIRSPHWPQNFPENSRCSWTAITHKSKHLEISFDNNFLIPSGDGQCQNSFVKVWAGTEEVDKALLATGCGNVAPGPVITPSNTFTAVFQSQEAPAQGFSASFVSRCGSNFTGPSGYIISPNYPKQYDNNMNCTYVIEANPLSVVLLTFVSFHLEARSAVTGSCVNDGVHIIRGYSVMSTPFATVCGDEMPAPLTIAGPVLLNFYSNEQITDFGFKFSYRIISCGGVFNFSSGIITSPAYSYADYPNDMHCLYTITVSDDKVIELKFSDFDVVPSTSCSHDYLAIYDGANTSDPLLGKFCGSKRPPNVKSSNNSMLLVFKTDSFQTAKGWKMSFRQTLGPQQGCGGYLTGSNNTFASPDSDSNGMYDKNLNCVWIIIAPVNKVIHLTFNTFALEAASTRQRCLYDYVKLYDGDSENANLAGTFCGSTVPAPFISSGNFLTVQFISDLTLEREGFNATYTIMDMPCGGTYNATWTPQNISSPNSSDPDVPFSICTWVIDSPPHQQVKITVWALQLTSQDCTQNYLQLQDSPQGHGNSRFQFCGRNASAVPVFYSSMSTAMVIFKSGVVNRNSRMSFTYQIADCNRDYHKAFGNLRSPGWPDNYDNDKDCTVTLTAPQNHTISLFFHSLGIENSVECRNDFLEVRNGSNSNSPLLGKYCGTLLPNPVFSQNNELYLRFKSDSVTSDRGYEIIWTSSPSGCGGTLYGDRGSFTSPGYPGTYPNNTYCEWVLVAPAGRLVTINFYFISIDDPGDCVQNYLTLYDGPNASSPSSGPYCGGDTSIAPFVASSNQVFIKFHADYARRPSAFRLTWDS

SEQ ID NO: 320 - protein, 417 aa, Artificial Sequence
  GIF
MAWFALYLLSLLWATAGTSTQTQSSCSVPSAQEPLVNGIQVLMENSVTSSAYPNPSILIAMNLAGAYNLKAQKLLTYQLMSSDNNDLTIGQLGLTIMALTSSCRDPGDKVSILQRQMENWAPSSPNAEASAFYGPSLAILALCQKNSEATLPIAVRFAKTLLANSSPFNVDTGAMATLALTCMYNKIPVGSEEGYRSLFGQVLKDIVEKISMKIKDNGIIGDIYSTGLAMQALSVTPEPSKKEWNCKKTTDMILNEIKQGKFHNPMSIAQILPSLKGKTYLDVPQVTCSPDHEVQPTLPSNPGPGPTSASNITVIYTINNQLRGVELLFNETINVSVKSGSVLLVVLEEAQRKNPMFKFETTMTSWGLVVSSINNIAENVNHKTYWQFLSGVTPLNEGVADYIPFNHEHITANFTQY

SEQ ID NO: 321 - protein, 433 aa, Artificial Sequence
  TCN1
MRQSHQLPLVGLLLFSFIPSQLCEICEVSEENYIRLKPLLNTMIQSNYNRGTSAVNVVLSLKLVGIQIQTLMQKMIQQIKYNVKSRLSDVSSGELALIILALGVCRNAEENLIYDYHLIDKLENKFQAEIENMEAHNGTPLTNYYQLSLDVLALCLFNGNYSTAEVVNHFTPENKNYYFGSQFSVDTGAMAVLALTCVKKSLINGQIKADEGSLKNISIYTKSLVEKILSEKKENGLIGNTFSTGEAMQALFVSSDYYNENDWNCQQTLNTVLTEISQGAFSNPNAAAQVLPALMGKTFLDINKDSSCVSASGNFNISADEPITVTPPDSQSYISVNYSVRINETYFTNVTVLNGSVFLSVMEKAQKMNDTIFGFTMEERSWGPYITCIQGLCANNNDRTYWELLSGGEPLSQGAGSYVVRNGENLEVRWSKY

SEQ ID NO: 322 - protein, 427 aa, Artificial Sequence
  TCN2
MRHLGAFLFLLGVLGALTEMCEIPEMDSHLVEKLGQHLLPWMDRLSLEHLNPSIYVGLRLSSLQAGTKEDLYLHSLKLGYQQCLLGSAFSEDDGDCQGKPSMGQLALYLLALRANCEFVRGHKGDRLVSQLKWFLEDEKRAIGHDHKGHPHTSYYQYGLGILALCLHQKRVHDSVVDKLLYAVEPFHQGHHSVDTAAMAGLAFTCLKRSNFNPGRRQRITMAIRTVREEILKAQTPEGHFGNVYSTPLALQFLMTSPMRGAELGTACLKARVALLASLQDGAFQNALMISQLLPVLNHKTYIDLIFPDCLAPRVMLEPAAETIPQTQEIISVTLQVLSLLPPYRQSISVLAGSTVEDVLKKAHELGGFTYETQASLSGPYLTSVMGKAAGEREFWQLLRDPNTPLLQGIADYRPKDGETIELRLVSW

SEQ ID NO: 323 - protein, 727 aa, Artificial Sequence
  PREPL
MQQKTKLFLQALKYSIPHLGKCMQKQHLNHYNFADHCYNRIKLKKYHLTKCLQNKPKISELARNIPSRSFSCKDLQPVKQENEKPLPENMDAFEKVRTKLETQPQEEYEIINVEVKHGGFVYYQEGCCLVRSKDEEADNDNYEVLFNLEELKLDQPFIDCIRVAPDEKYVAAKIRTEDSEASTCVIIKLSDQPVMEASFPNVSSFEWVKDEEDEDVLFYTFQRNLRCHDVYRATFGDNKRNERFYTEKDPSYFVFLYLTKDSRFLTINIMNKTTSEVWLIDGLSPWDPPVLIQKRIHGVLYYVEHRDDELYILTNVGEPTEFKLMRTAADTPAIMNWDLFFTMKRNTKVIDLDMFKDHCVLFLKHSNLLYVNVIGLADDSVRSLKLPPWACGFIMDTNSDPKNCPFQLCSPIRPPKYYTYKFAEGKLFEETGHEDPITKTSRVLRLEAKSKDGKLVPMTVFHKTDSEDLQKKPLLVHVYGAYGMDLKMNFRPERRVLVDDGWILAYCHVRGGGELGLQWHADGRLTKKLNGLADLEACIKTLHGQGFSQPSLTTLTAFSAGGVLAGALCNSNPELVRAVTLEAPFLDVLNTMMDTTLPLTLEELEEWGNPSSDEKHKNYIKRYCPYQNIKPQHYPSIHITAYENDERVPLKGIVSYTEKLKEAIAEHAKDTGEGYQTPNIILDIQPGGNHVIEDSHKKITAQIKFLYEELGLDSTSVFEDLKKYLKF

SEQ ID NO: 324 - protein, 533 aa, Artificial Sequence
  PHGDH
MAFANLRKVLISDSLDPCCRKILQDGGLQVVEKQNLSKEELIAELQDCEGLIVRSATKVTADVINAAEKLQVVGRAGTGVDNVDLEAATRKGILVMNTPNGNSLSAAELTCGMIMCLARQIPQATASMKDGKWERKKFMGTELNGKTLGILGLGRIGREVATRMQSFGMKTIGYDPIISPEVSASFGVQQLPLEEIWPLCDFITVHTPLLPSTTGLLNDNTFAQCKKGVRVVNCARGGIVDEGALLRALQSGQCAGAALDVFTEEPPRDRALVDHENVISCPHLGASTKEAQSRCGEEIAVQFVDMVKGKSLTGVVNAQALTSAFSPHTKPWIGLAEALGTLMRAWAGSPKGTIQVITQGTSLKNAGNCLSPAVIVGLLKEASKQADVNLVNAKLLVKEAGLNVTTSHSPAAPGEQGFGECLLAVALAGAPYQAVGLVQGTTPVLQGLNGAVFRPEVPLRRDLPLLLFRTQTSDPAMLPTMIGLLAEAGVRLLSYQTSLVSDGETWHVMGISSLLPSLEAWKQHVTEAFQFHF

SEQ ID NO: 325 - protein, 370 aa, Artificial Sequence
  PSAT1
MDAPRQVVNFGPGPAKLPHSVLLEIQKELLDYKGVGISVLEMSHRSSDFAKIINNTENLVRELLAVPDNYKVIFLQGGGCGQFSAVPLNLIGLKAGRCADYVVTGAWSAKAAEEAKKFGTINIVHPKLGSYTKIPDPSTWNLNPDASYVYYCANETVHGVEFDFIPDVKGAVLVCDMSSNFLSKPVDVSKFGVIFAGAQKNVGSAGVTVVIVRDDLLGFALRECPSVLEYKVQAGNSSLYNTPPCFSIYVMGLVLEWIKNNGGAAAMEKLSSIKSQTIYEIIDNSQGFYVCPVEPQNRSKMNIPFRIGNAKGDDALEKRFLDKALELNMLSLKGHRSVGGIRASLYNAVTIEDVQKLAAFMKKFLEMHQL

SEQ ID NO: 326 - protein, 225 aa, Artificial Sequence
  PSPH
MVSHSELRKLFYSADAVCFDVDSTVIREEGIDELAKICGVEDAVSEMTRRAMGGAVPFKAALTERLALIQPSREQVQRLIAEQPPHLTPGIRELVSRLQERNVQVFLISGGFRSIVEHVASKLNIPATNVFANRLKFYFNGEYAGFDETQPTAESGGKGKVIKLLKEKFHFKKIIMIGDGATDMEACPPADAFIGFGGNVIRQQVKDNAKWYITDFVELLGELEE

SEQ ID NO: 327 - protein, 403 aa, Artificial Sequence
  AMT
MQRAVSVVARLGFRLQAFPPALCRPLSCAQEVLRRTPLYDFHLAHGGKMVAFAGWSLPVQYRDSHTDSHLHTRQHCSLFDVSHMLQTKILGSDRVKLMESLVVGDIAELRPNQGTLSLFTNEAGGILDDLIVTNTSEGHLYVVSNAGCWEKDLALMQDKVRELQNQGRDVGLEVLDNALLALQGPTAAQVLQAGVADDLRKLPFMTSAVMEVFGVSGCRVTRCGYTGEDGVEISVPVAGAVHLATAILKNPEVKLAGLAARDSLRLEAGLCLYGNDIDEHTTPVEGSLSWTLGKRRRAAMDFPGAKVIVPQLKGRVQRRRVGLMCEGAPMRAHSPILNMEGTKIGTVTSGCPSPSLKKNVAMGYVPCEYSRPGTMLLVEVRRKQQMAVVSKMPFVPTNYYTLK

SEQ ID NO: 328 - protein, 173 aa, Artificial Sequence
  GCSH
MALRVVRSVRALLCTLRAVPSPAAPCPPRPWQLGVGAVRTLRTGPALLSVRKFTEKHEWVTTENGIGTVGISNFAQEALGDVVYCSLPEVGTKLNKQDEFGALESVKAASELYSPLSGEVTEINEALAENPGLVNKSCYEDGWLIKMTLSNPSELDELMSEEAYEKYIKSIEE

SEQ ID NO: 329 - protein, 1020 aa, Artificial Sequence
  GLDC
MQSCARAWGLRLGRGVGGGRRLAGGSGPCWAPRSRDSSSGGGDSAAAGASRLLERLLPRHDDFARRHIGPGDKDQREMLQTLGLASIDELIEKTVPANIRLKRPLKMEDPVCENEILATLHAISSKNQIWRSYIGMGYYNCSVPQTILRNLLENSGWITQYTPYQPEVSQGRLESLLNYQTMVCDITGLDMANASLLDEGTAAAEALQLCYRHNKRRKFLVDPRCHPQTIAVVQTRAKYTGVLTELKLPCEMDFSGKDVSGVLFQYPDTEGKVEDFTELVERAHQSGSLACCATDLLALCILRPPGEFGVDIALGSSQRFGVPLGYGGPHAAFFAVRESLVRMMPGRMVGVTRDATGKEVYRLALQTREQHIRRDKATSNICTAQALLANMAAMFAIYHGSHGLEHIARRVHNATLILSEGLKRAGHQLQHDLFFDTLKIQCGCSVKEVLGRAAQRQINFRLFEDGTLGISLDETVNEKDLDDLLWIFGCESSAELVAESMGEECRGIPGSVFKRTSPFLTHQVFNSYHSETNIVRYMKKLENKDISLVHSMIPLGSCTMKLNSSSELAPITWKEFANIHPFVPLDQAQGYQQLFRELEKDLCELTGYDQVCFQPNSGAQGEYAGLATIRAYLNQKGEGHRTVCLIPKSAHGTNPASAHMAGMKIQPVEVDKYGNIDAVHLKAMVDKHKENLAAIMITYPSTNGVFEENISDVCDLIHQHGGQVYLDGANMNAQVGICRPGDFGSDVSHLNLHKTFCIPHGGGGPGMGPIGVKKHLAPFLPNHPVISLKRNEDACPVGTVSAAPWGSSSILPISWAYIKMMGGKGLKQATETAILNANYMAKRLETHYRILFRGARGYVGHEFILDTRPFKKSANIEAVDVAKRLQDYGFHAPTMSWPVAGTLMVEPTESEDKAELDRFCDAMISIRQEIADIEEGRIDPRVNPLKMSPHSLTCVTSSHWDRPYSREVAAFPLPFVKPENKFWPTIARIDDIYGDQHLVCTCPPMEVYESPFSEQKRASS

SEQ ID NO: 330 - protein, 372 aa, Artificial Sequence
  LIAS
MSLRCGDAARTLGPRVFGRYFCSPVRPLSSLPDKKKELLQNGPDLQDFVSGDLADRSTWDEYKGNLKRQKGERLRLPPWLKTEIPMGKNYNKLKNTLRNLNLHTVCEEARCPNIGECWGGGEYATATATIMLMGDTCTRGCRFCSVKTARNPPPLDASEPYNTAKAIAEWGLDYVVLTSVDRDDMPDGGAEHIAKTVSYLKERNPKILVECLTPDFRGDLKAIEKVALSGLDVYAHNVETVPELQSKVRDPRANFDQSLRVLKHAKKVQPDVISKTSIMLGLGENDEQVYATMKALREADVDCLTLGQYMQPTRRHLKVEEYITPEKFKYWEKVGNELGFHYTASGPLVRSSYKAGEFFLKNLVAKRKTKDL

SEQ ID NO: 331 - protein, 254 aa, Artificial Sequence
  NFU1
MAATARRGWGAAAVAAGLRRRFCHMLKNPYTIKKQPLHQFVQRPLFPLPAAFYHPVRYMFIQTQDTPNPNSLKFIPGKPVLETRTMDFPTPAAAFRSPLARQLFRIEGVKSVFFGPDFITVTKENEELDWNLLKPDIYATIMDFFASGLPLVTEETPSGEAGSEEDDEVVAMIKELLDTRIRPTVQEDGGDVIYKGFEDGIVQLKLQGSCTSCPSSIITLKNGIQNMLQFYIPEVEGVEQVMDDESDEKEANSP

SEQ ID NO: 332 - protein, 706 aa, Artificial Sequence
  SLC6A9
MSGGDTRAAIARPRMAAAHGPVAPSSPEQVTLLPVQRSFFLPPFSGATPSTSLAESVLKVWHGAYNSGLLPQLMAQHSLAMAQNGAVPSEATKRDQNLKRGNWGNQIEFVLTSVGYAVGLGNVWRFPYLCYRNGGGAFMFPYFIMLIFCGIPLFFMELSFGQFASQGCLGVWRISPMFKGVGYGMMVVSTYIGIYYNVVICIAFYYFFSSMTHVLPWAYCNNPWNTHDCAGVLDASNLTNGSRPAALPSNLSHLLNHSLQRTSPSEEYWRLYVLKLSDDIGNFGEVRLPLLGCLGVSWLVVFLCLIRGVKSSGKVVYFTATFPYVVLTILFVRGVTLEGAFDGIMYYLTPQWDKILEAKVWGDAASQIFYSLGCAWGGLITMASYNKFHNNCYRDSVIISITNCATSVYAGFVIFSILGFMANHLGVDVSRVADHGPGLAFVAYPEALTLLPISPLWSLLFFFMLILLGLGTQFCLLETLVTAIVDEVGNEWILQKKTYVTLGVAVAGFLLGIPLTSQAGIYWLLLMDNYAASFSLVVISCIMCVAIMYIYGHRNYFQDIQMMLGFPPPLFFQICWRFVSPAIIFFILVFTVIQYQPITYNHYQYPGWAVAIGFLMALSSVLCIPLYAMFRLCRTDGDTLLQRLKNATKPSRDWGPALLEHRTGRYAPTIAPSPEDGFEVQPLHPDKAQIPIVGSNGSSRLQDSRI

SEQ ID NO: 333 - protein, 492 aa, Artificial Sequence
  SLC2A1
MEPSSKKLTGRLMLAVGGAVLGSLQFGYNTGVINAPQKVIEEFYNQTWVHRYGESILPTTLTTLWSLSVAIFSVGGMIGSFSVGLFVNRFGRRNSMLMMNLLAFVSAVLMGFSKLGKSFEMLILGRFIIGVYCGLTTGFVPMYVGEVSPTALRGALGTLHQLGIVVGILIAQVFGLDSIMGNKDLWPLLLSIIFIPALLQCIVLPFCPESPRFLLINRNEENRAKSVLKKLRGTADVTHDLQEMKEESRQMMREKKVTILELFRSPAYRQPILIAVVLQLSQQLSGINAVFYYSTSIFEKAGVQQPVYATIGSGIVNTAFTVVSLFVVERAGRRTLHLIGLAGMAGCAILMTIALALLEQLPWMSYLSIVAIFGFVAFFEVGPGPIPWFIVAELFSQGPRPAAIAVAGFSNWTSNFIVGMCFQYVEQLCGPYVFIIFTVLLVLFFIFTYFKVPETKGRTFDEIASGFRQGGASQSDKTPEELFHPLGADSQV

SEQ ID NO: 334 - protein, 1500 aa, Artificial Sequence
  ATP7A
MDPSMGVNSVTISVEGMTCNSCVWTIEQQIGKVNGVHHIKVSLEEKNATIIYDPKLQTPKTLQEAIDDMGFDAVIHNPDPLPVLTDTLFLTVTASLTLPWDHIQSTLLKTKGVTDIKIYPQKRTVAVTIIPSIVNANQIKELVPELSLDTGTLEKKSGACEDHSMAQAGEVVLKMKVEGMTCHSCTSTIEGKIGKLQGVQRIKVSLDNQEATIVYQPHLISVEEMKKQIEAMGFPAFVKKQPKYLKLGAIDVERLKNTPVKSSEGSQQRSPSYTNDSTATFIIDGMHCKSCVSNIESTLSALQYVSSIVVSLENRSAIVKYNASSVTPESLRKAIEAVSPGLYRVSITSEVESTSNSPSSSSLQKIPLNVVSQPLTQETVINIDGMTCNSCVQSIEGVISKKPGVKSIRVSLANSNGTVEYDPLLTSPETLRGAIEDMGFDATLSDTNEPLVVIAQPSSEMPLLTSTNEFYTKGMTPVQDKEEGKNSSKCYIQVTGMTCASCVANIERNLRREEGIYSILVALMAGKAEVRYNPAVIQPPMIAEFIRELGFGATVIENADEGDGVLELVVRGMTCASCVHKIESSLTKHRGILYCSVALATNKAHIKYDPEIIGPRDIIHTIESLGFEASLVKKDRSASHLDHKREIRQWRRSFLVSLFFCIPVMGLMIYMMVMDHHFATLHHNQNMSKEEMINLHSSMFLERQILPGLSVMNLLSFLLCVPVQFFGGWYFYIQAYKALKHKTANMDVLIVLATTIAFAYSLIILLVAMYERAKVNPITFFDTPPMLFVFIALGRWLEHIAKGKTSEALAKLISLQATEATIVTLDSDNILLSEEQVDVELVQRGDIIKVVPGGKFPVDGRVIEGHSMVDESLITGEAMPVAKKPGSTVIAGSINQNGSLLICATHVGADTTLSQIVKLVEEAQTSKAPIQQFADKLSGYFVPFIVFVSIATLLVWIVIGFLNFEIVETYFPGYNRSISRTETIIRFAFQASITVLCIACPCSLGLATPTAVMVGTGVGAQNGILIKGGEPLEMAHKVKVVVFDKTGTITHGTPVVNQVKVLTESNRISHHKILAIVGTAESNSEHPLGTAITKYCKQELDTETLGTCIDFQVVPGCGISCKVTNIEGLLHKNNWNIEDNNIKNASLVQIDASNEQSSTSSSMIIDAQISNALNAQQYKVLIGNREWMIRNGLVINNDVNDFMTEHERKGRTAVLVAVDDELCGLIAIADTVKPEAELAIHILKSMGLEVVLMTGDNSKTARSIASQVGITKVFAEVLPSHKVAKVKQLQEEGKRVAMVGDGINDSPALAMANVGIAIGTGTDVAIEAADVVLIRNDLLDVVASIDLSRKTVKRIRINFVFALIYNLVGIPIAAGVFMPIGLVLQPWMGSAAMAASSVSVVLSSLFLKLYRKPTYESYELPARSQIGQKSPSEISVHVGIDDTSRNSPKLGLLDRIVNYSRASINSLLSDKRSLNSVVTSEPDKHSLLVGDFREDDDTAL

SEQ ID NO: 335 - protein, 158 aa, Artificial Sequence
  AP1S1
MMRFMLLFSRQGKLRLQKWYLATSDKERKKMVRELMQVVLARKPKMCSFLEWRDLKVVYKRYASLYFCCAIEGQDNELITLELIHRYVELLDKYFGSVCELDIIFNFEKAYFILDEFLMGGDVQDTSKKSVLKAIEQADLLQEEDESPRSVLEEMGLA

SEQ ID NO: 336 - protein, 1065 aa, Artificial Sequence
  CP
MKILILGIFLFLCSTPAWAKEKHYYIGIIETTWDYASDHGEKKLISVDTEHSNIYLQNGPDRIGRLYKKALYLQYTDETFRTTIEKPVWLGFLGPIIKAETGDKVYVHLKNLASRPYTFHSHGITYYKEHEGAIYPDNTTDFQRADDKVYPGEQYTYMLLATEEQSPGEGDGNCVTRIYHSHIDAPKDIASGLIGPLIICKKDSLDKEKEKHIDREFVVMFSVVDENFSWYLEDNIKTYCSEPEKVDKDNEDFQESNRMYSVNGYTFGSLPGLSMCAEDRVKWYLFGMGNEVDVHAAFFHGQALTNKNYRIDTINLFPATLFDAYMVAQNPGEWMLSCQNLNHLKAGLQAFFQVQECNKSSSKDNIRGKHVRHYYIAAEEIIWNYAPSGIDIFTKENLTAPGSDSAVFFEQGTTRIGGSYKKLVYREYTDASFTNRKERGPEEEHLGILGPVIWAEVGDTIRVTFHNKGAYPLSIEPIGVRFNKNNEGTYYSPNYNPQSRSVPPSASHVAPTETFTYEWTVPKEVGPTNADPVCLAKMYYSAVDPTKDIFTGLIGPMKICKKGSLHANGRQKDVDKEFYLFPTVFDENESLLLEDNIRMFTTAPDQVDKEDEDFQESNKMHSMNGFMYGNQPGLTMCKGDSVVWYLFSAGNEADVHGIYFSGNTYLWRGERRDTANLFPQTSLTLHMWPDTEGTFNVECLTTDHYTGGMKQKYTVNQCRRQSEDSTFYLGERTYYIAAVEVEWDYSPQREWEKELHHLQEQNVSNAFLDKGEFYIGSKYKKVVYRQYTDSTFRVPVERKAEEEHLGILGPQLHADVGDKVKIIFKNMATRPYSIHAHGVQTESSTVTPTLPGETLTYVWKIPERSGAGTEDSACIPWAYYSTVDQVKDLYSGLIGPLIVCRRPYLKVFNPRRKLEFALLFLVFDENESWYLDDNIKTYSDHPEKVNKDDEEFIESNKMHAINGRMFGNLQGLTMHVGDEVNWYLMGMGNEIDLHTVHFHGHSFQYKHRGVYSSDVFDIFPGTYQTLEMFPRTPGIWLLHCHVTDHIHAGMETTYTVLQNEDTKSG

SEQ ID NO: 337 - protein, 549 aa, Artificial Sequence
  SLC33A1
MSPTISHKDSSRQRRPGNFSHSLDMKSGPLPPGGWDDSHLDSAGREGDREALLGDTGTGDFLKAPQSFRAELSSILLLLFLYVLQGIPLGLAGSIPLILQSKNVSYTDQAFFSFVFWPFSLKLLWAPLVDAVYVKNFGRRKSWLVPTQYILGLFMIYLSTQVDRLLGNTDDRTPDVIALTVAFFLFEFLAATQDIAVDGWALTMLSRENVGYASTCNSVGQTAGYFLGNVLFLALESADFCNKYLRFQPQPRGIVTLSDFLFFWGTVFLITTTLVALLKKENEVSVVKEETQGITDTYKLLFAIIKMPAVLTFCLLILTAKIGFSAADAVTGLKLVEEGVPKEHLALLAVPMVPLQIILPLIISKYTAGPQPLNTFYKAMPYRLLLGLEYALLVWWTPKVEHQGGFPIYYYIVVLLSYALHQVTVYSMYVSIMAFNAKVSDPLIGGTYMTLLNTVSNLGGNWPSTVALWLVDPLTVKECVGASNQNCRTPDAVELCKKLGGSCVTALDGYYVESIICVFIGFGWWFFLGPKFKKLQDEGSSSWKCKRNN

SEQ ID NO: 338 - protein, 323 aa, Artificial Sequence
  PEX7
MSAVCGGAARMLRTPGRHGYAAEFSPYLPGRLACATAQHYGIAGCGTLLILDPDEAGLRLFRSFDWNDGLFDVTWSENNEHVLITCSGDGSLQLWDTAKAAGPLQVYKEHAQEVYSVDWSQTRGEQLVVSGSWDQTVKLWDPTVGKSLCTFRGHESIIYSTIWSPHIPGCFASASGDQTLRIWDVKAAGVRIVIPAHQAEILSCDWCKYNENLLVTGAVDCSLRGWDLRNVRQPVFELLGHTYAIRRVKFSPFHASVLASCSYDFTVRFWNFSKPDSLLETVEHHTEFTCGLDFSLQSPTQVADCSWDETIKIYDPACLTIPA

SEQ ID NO: 339 - protein, 338 aa, Artificial Sequence
  PHYH
MEQLRAAARLQIVLGHLGRPSAGAVVAHPTSGTISSASFHPQQFQYTLDNNVLTLEQRKFYEENGFLVIKNLVPDADIQRFRNEFEKICRKEVKPLGLTVMRDVTISKSEYAPSEKMITKVQDFQEDKELFRYCTLPEILKYVECFTGPNIMAMHTMLINKPPDSGKKTSRHPLHQDLHYFPFRPSDLIVCAWTAMEHISRNNGCLVVLPGTHKGSLKPHDYPKWEGGVNKMFHGIQDYEENKARVHLVMEKGDTVFFHPLLIHGSGQNKTQGFRKAISCHFASADCHYIDVKGTSQENIEKEVVGIAHKFFGAENSVNLKDIWMFRARLVKGERTNL

SEQ ID NO: 340 - protein, 658 aa, Artificial Sequence
  AGPS
MAEAAAAAGGTGLGAGASYGSAADRDRDPDPDRAGRRLRVLSGHLLGRPREALSTNECKARRAASAATAAPTATPAAQESGTIPKKRQEVMKWNGWGYNDSKFIFNKKGQIELTGKRYPLSGMGLPTFKEWIQNTLGVNVEHKTTSKASLNPSDTPPSVVNEDFLHDLKETNISYSQEADDRVFRAHGHCLHEIFLLREGMFERIPDIVLWPTCHDDVVKIVNLACKYNLCIIPIGGGTSVSYGLMCPADETRTIISLDTSQMNRILWVDENNLTAHVEAGITGQELERQLKESGYCTGHEPDSLEFSTVGGWVSTRASGMKKNIYGNIEDLVVHIKMVTPRGIIEKSCQGPRMSTGPDIHHFIMGSEGTLGVITEATIKIRPVPEYQKYGSVAFPNFEQGVACLREIAKQRCAPASIRLMDNKQFQFGHALKPQVSSIFTSFLDGLKKFYITKFKGFDPNQLSVATLLFEGDREKVLQHEKQVYDIAAKFGGLAAGEDNGQRGYLLTYVIAYIRDLALEYYVLGESFETSAPWDRVVDLCRNVKERITRECKEKGVQFAPFSTCRVTQTYDAGACIYFYFAFNYRGISDPLTVFEQTEAAAREEILANGGSLSHHHGVGKLRKQWLKESISDVGFGMLKSVKEYVDPNNIFGNRNLL

SEQ ID NO: 341 - protein, 680 aa, Artificial Sequence
  GNPAT
MESSSSSNSYFSVGPTSPSAVVLLYSKELKKWDEFEDILEERRHVSDLKFAMKCYTPLVYKGITPCKPIDIKCSVLNSEEIHYVIKQLSKESLQSVDVLREEVSEILDEMSHKLRLGAIRFCAFTLSKVFKQIFSKVCVNEEGIQKLQRAIQEHPVVLLPSHRSYIDFLMLSFLLYNYDLPVPVIAAGMDFLGMKMVGELLRMSGAFFMRRTFGGNKLYWAVFSEYVKTMLRNGYAPVEFFLEGTRSRSAKTLTPKFGLLNIVMEPFFKREVFDTYLVPISISYDKILEETLYVYELLGVPKPKESTTGLLKARKILSENFGSIHVYFGDPVSLRSLAAGRMSRSSYNLVPRYIPQKQSEDMHAFVTEVAYKMELLQIENMVLSPWTLIVAVLLQNRPSMDFDALVEKTLWLKGLTQAFGGFLIWPDNKPAEEVVPASILLHSNIASLVKDQVILKVDSGDSEVVDGLMLQHITLLMCSAYRNQLLNIFVRPSLVAVALQMTPGFRKEDVYSCFRFLRDVFADEFIFLPGNTLKDFEEGCYLLCKSEAIQVTTKDILVTEKGNTVLEFLVGLFKPFVESYQIICKYLLSEEEDHFSEEQYLAAVRKFTSQLLDQGTSQCYDVLSSDVQKNALAACVRLGVVEKKKINNNCIFNVNEPATTKLEEMLGCKTPIGKPATAKL

SEQ ID NO: 342 - protein, 745 aa, Artificial Sequence [sequence omitted]

SEQ ID NO: 343 - protein, 660 aa, Artificial Sequence
  ACOX1
MNPDLRRERDSASFNPELLTHILDGSPEKTRRRREIENMILNDPDFQHEDLNFLTRSQRYEVAVRKSAIMVKKMREFGIADPDEIMWFKKLHLVNFVEPVGLNYSMFIPTLLNQGTTAQKEKWLLSSKGLQIIGTYAQTEMGHGTHLRGLETTATYDPETQEFILNSPTVTSIKWWPGGLGKTSNHAIVLAQLITKGKCYGLHAFIVPIREIGTHKPLPGITVGDIGPKFGYDEIDNGYLKMDNHRIPRENMLMKYAQVKPDGTYVKPLSNKLTYGTMVFVRSFLVGEAARALSKACTIAIRYSAVRHQSEIKPGEPEPQILDFQTQQYKLFPLLATAYAFQFVGAYMKETYHRINEGIGQGDLSELPELHALTAGLKAFTSWTANTGIEACRMACGGHGYSHCSGLPNIYVNFTPSCTFEGENTVMMLQTARFLMKSYDQVHSGKLVCGMVSYLNDLPSQRIQPQQVAVWPTMVDINSPESLTEAYKLRAARLVEIAAKNLQKEVIHRKSKEVAWNLTSVDLVRASEAHCHYVVVKLFSEKLLKIQDKAIQAVLRSLCLLYSLYGISQNAGDFLQGSIMTEPQITQVNQRVKELLTLIRSDAVALVDAFDFQDVTLGSVLGRYDGNVYENLFEWAKNSPLNKAEVHESYKHLKSLQSKL

SEQ ID NO: 344 - protein, 1283 aa, Artificial Sequence
  PEX1
MWGSDRLAGAGGGGAAVTVAFTNARDCFLHLPRRLVAQLHLLQNQAIEVVWSHQPAFLSWVEGRHFSDQGENVAEINRQVGQKLGLSNGGQVFLKPCSHVVSCQQVEVEPLSADDWEILELHAVSLEQHLLDQIRIVFPKAIFPVWVDQQTYIFIQIVALIPAASYGRLETDTKLLIQPKTRRAKENTFSKADAEYKKLHSYGRDQKGMMKELQTKQLQSNTVGITESNENESEIPVDSSSVASLWTMIGSIFSFQSEKKQETSWGLTEINAFKNMQSKVVPLDNIFRVCKSQPPSIYNASATSVFHKHCAIHVFPWDQEYFDVEPSFTVTYGKLVKLLSPKQQQSKTKQNVLSPEKEKQMSEPLDQKKIRSDHNEEDEKACVLQVVWNGLEELNNAIKYTKNVEVLHLGKVWIPDDLRKRLNIEMHAVVRITPVEVTPKIPRSLKLQPRENLPKDISEEDIKTVFYSWLQQSTTTMLPLVISEEEFIKLETKDGLKEFSLSIVHSWEKEKDKNIFLLSPNLLQKTTIQVLLDPMVKEENSEEIDFILPFLKLSSLGGVNSLGVSSLEHITHSLLGRPLSRQLMSLVAGLRNGALLLTGGKGSGKSTLAKAICKEAFDKLDAHVERVDCKALRGKRLENIQKTLEVAFSEAVWMQPSVVLLDDLDLIAGLPAVPEHEHSPDAVQSQRLAHALNDMIKEFISMGSLVALIATSQSQQSLHPLLVSAQGVHIFQCVQHIQPPNQEQRCEILCNVIKNKLDCDINKFTDLDLQHVAKETGGFVARDFTVLVDRAIHSRLSRQSISTREKLVLTTLDFQKALRGFLPASLRSVNLHKPRDLGWDKIGGLHEVRQILMDTIQLPAKYPELFANLPIRQRTGILLYGPPGTGKTLLAGVIARESRMNFISVKGPELLSKYIGASEQAVRDIFIRAQAAKPCILFFDEFESIAPRRGHDNTGVTDRVVNQLLTQLDGVEGLQGVYVLAATSRPDLIDPALLRPGRLDKCVYCPPPDQVSRLEILNVLSDSLPLADDVDLQHVASVTDSFTGADLKALLYNAQLEALHGMLLSSGLQDGSSSSDSDLSLSSMVFLNHSSGSDDSAGDGECGLDQSLVSLEMSEILPDESKFNMYRLYFGSSYESELGNGTSSDLSSQCLSAPSSMTQDLPGVPGKDQLFSQPPVLRTASQEGCQELTQEQRDQLRADISIIKGRYRSQSGEDESMNQPGPIKTRLAISQSHLMTALGHTRPSISEDDWKNFAELYESFQNPKRRKNQSGTMFRPGQKVTLA

SEQ ID NO: 345 - protein, 305 aa, Artificial Sequence
  PEX2
MASRKENAKSANRVLRISQLDALELNKALEQLVWSQFTQCFHGFKPGLLARFEPEVKACLWVFLWRFTIYSKNATVGQSVLNIKYKNDFSPNLRYQPPSKNQKIWYAVCTIGGRWLEERCYDLFRNHHLASFGKVKQCVNFVIGLLKLGGLINFLIFLQRGKFATLTERLLGIHSVFCKPQNICEVGFEYMNRELLWHGFAEFLIFLLPLINVQKLKAKLSSWCIPLTGAPNSDNTLATSGKECALCGEWPTMPHTIGCEHIFCYFCAKSSFLFDVYFTCPKCGTEVHSLQPLKSGIEMSEVNAL

SEQ ID NO: 346 - protein, 373 aa, Artificial Sequence
  PEX3
MLRSVWNFLKRHKKKCIFLGTVLGGVYILGKYGQKKIREIQEREAAEYIAQARRQYHFESNQRTCNMTVLSMLPTLREALMQQLNSESLTALLKNRPSNKLEIWEDLKIISFTRSTVAVYSTCMLVVLLRVQLNIIGGYIYLDNAAVGKNGTTILAPPDVQQQYLSSIQHLLGDGLTELITVIKQAVQKVLGSVSLKHSLSLLDLEQKLKEIRNLVEQHKSSSWINKDGSKPLLCHYMMPDEETPLAVQACGLSPRDITTIKLLNETRDMLESPDFSTVLNTCLNRGFSRLLDNMAEFFRPTEQDLQHGNSMNSLSSVSLPLAKIIPIVNGQIHSVCSETPSHFVQDLLTMEQVKDFAANVYEAFSTPQQLEK

SEQ ID NO: 347 - protein, 639 aa, Artificial Sequence
  PEX5
MAMRELVEAECGGANPLMKLAGHFTQDKALRQEGLRPGPWPPGAPASEAASKPLGVASEDELVAEFLQDQNAPLVSRAPQTFKMDDLLAEMQQIEQSNFRQAPQRAPGVADLALSENWAQEFLAAGDAVDVTQDYNETDWSQEFISEVTDPLSVSPARWAEEYLEQSEEKLWLGEPEGTATDRWYDEYHPEEDLQHTASDFVAKVDDPKLANSEFLKFVRQIGEGQVSLESGAGSGRAQAEQWAAEFIQQQGTSDAWVDQFTRPVNTSALDMEFERAKSAIESDVDFWDKLQAELEEMAKRDAEAHPWLSDYDDLTSATYDKGYQFEEENPLRDHPQPFEEGLRRLQEGDLPNAVLLFEAAVQQDPKHMEAWQYLGTTQAENEQELLAISALRRCLELKPDNQTALMALAVSFTNESLQRQACETLRDWLRYTPAYAHLVTPAEEGAGGAGLGPSKRILGSLLSDSLFLEVKELFLAAVRLDPTSIDPDVQCGLGVLFNLSGEYDKAVDCFTAALSVRPNDYLLWNKLGATLANGNQSEEAVAAYRRALELQPGYIRSRYNLGISCINLGAHREAVEHFLEALNMQRKSRGPRGEGGAMSENIWSTLRLALSMLGQSDAYGAADARDLSTLLTMFGLPQ

SEQ ID NO: 348 - protein, 980 aa, Artificial Sequence
  PEX6
MALAVLRVLEPFPTETPPLAVLLPPGGPWPAAELGLVLALRPAGESPAGPALLVAALEGPDAGTEEQGPGPPQLLVSRALLRLLALGSGAWVRARAVRRPPALGWALLGTSLGPGLGPRVGPLLVRRGETLPVPGPRVLETRPALQGLLGPGTRLAVTELRGRARLCPESGDSSRPPPPPVVSSFAVSGTVRRLQGVLGGTGDSLGVSRSCLRGLGLFQGEWVWVAQARESSNTSQPHLARVQVLEPRWDLSDRLGPGSGPLGEPLADGLALVPATLAFNLGCDPLEMGELRIQRYLEGSIAPEDKGSCSLLPGPPFARELHIEIVSSPHYSTNGNYDGVLYRHFQIPRVVQEGDVLCVPTIGQVEILEGSPEKLPRWREMFFKVKKTVGEAPDGPASAYLADTTHTSLYMVGSTLSPVPWLPSEESTLWSSLSPPGLEALVSELCAVLKPRLQPGGALLTGTSSVLLRGPPGCGKTTVVAAACSHLGLHLLKVPCSSLCAESSGAVETKLQAIFSRARRCRPAVLLLTAVDLLGRDRDGLGEDARVMAVLRHLLLNEDPLNSCPPLMVVATTSRAQDLPADVQTAFPHELEVPALSEGQRLSILRALTAHLPLGQEVNLAQLARRCAGFVVGDLYALLTHSSRAACTRIKNSGLAGGLTEEDEGELCAAGFPLLAEDFGQALEQLQTAHSQAVGAPKIPSVSWHDVGGLQEVKKEILETIQLPLEHPELLSLGLRRSGLLLHGPPGTGKTLLAKAVATECSLTFLSVKGPELINMYVGQSEENVREVFARARAAAPCIIFFDELDSLAPSRGRSGDSGGVMDRVVSQLLAELDGLHSTQDVFVIGATNRPDLLDPALLRPGRFDKLVFVGANEDRASQLRVLSAITRKFKLEPSVSLVNVLDCCPPQLTGADLYSLCSDAMTAALKRRVHDLEEGLEPGSSALMLTMEDLLQAAARLQPSVSEQELLRYKRIQRKFAAC

SEQ ID NO: 349 - protein, 326 aa, Artificial Sequence
  PEX10
MAPAAASPPEVIRAAQKDEYYRGGLRSAAGGALHSLAGARKWLEWRKEVELLSDVAYFGLTTLAGYQTLGEEYVSIIQVDPSRIHVPSSLRRGVLVTLHAVLPYLLDKALLPLEQELQADPDSGRPLQGSLGPGGRGCSGARRWMRHHTATLTEQQRRALLRAVFVLRQGLACLQRLHVAWFYIHGVFYHLAKRLTGITYLRVRSLPGEDLRARVSYRLLGVISLLHLVLSMGLQLYGFRQRQRARKEWRLHRGLSHRRASLEERAVSRNPLCTLCLEERRHPTATPCGHLFCWECITAWCSSKAECPLCREKFPPQKLIYLRHYR

SEQ ID NO: 350 - protein, 359 aa, Artificial Sequence
  PEX12
MAEHGAHFTAASVADDQPSIFEVVAQDSLMTAVRPALQHVVKVLAESNPTHYGFLWRWFDEIFTLLDLLLQQHYLSRTSASFSENFYGLKRIVMGDTHKSQRLASAGLPKQQLWKSIMFLVLLPYLKVKLEKLVSSLREEDEYSIHPPSSRWKRFYRAFLAAYPFVNMAWEGWFLVQQLRYILGKAQHHSPLLRLAGVQLGRLTVQDIQALEHKPAKASMMQQPARSVSEKINSALKKAVGGVALSLSTGLSVGVFFLQFLDWWYSSENQETIKSLTALPTPPPPVHLDYNSDSPLLPKMKTVCPLCRKTRVNDTVLATSGYVFCYRCVFHYVRSHQACPITGYPTEVQHLIKLYSPEN

SEQ ID NO: 351 - protein, 403 aa, Artificial Sequence
  PEX13
MASQPPPPPKPWETRRIPGAGPGPGPGPTFQSADLGPTLMTRPGQPALTRVPPPILPRPSQQTGSSSVNTFRPAYSSFSSGYGAYGNSFYGGYSPYSYGYNGLGYNRLRVDDLPPSRFVQQAEESSRGAFQSIESIVHAFASVSMMMDATFSAVYNSFRAVLDVANHFSRLKIHFTKVFSAFALVRTIRYLYRRLQRMLGLRRGSENEDLWAESEGTVACLGAEDRAATSAKSWPIFLFFAVILGGPYLIWKLLSTHSDEVTDSINWASGEDDHVVARAEYDFAAVSEEEISFRAGDMLNLALKEQQPKVRGWLLASLDGQTTGLIPANYVKILGKRKGRKTVESSKVSKQQQSFTNPTLTKGATVADSLDEQEAAFESVFVETNKVPVAPDSIGKDGEKQDL

SEQ ID NO: 352 - protein, 377 aa, Artificial Sequence
  PEX14
MASSEQAEQPSQPSSTPGSENVLPREPLIATAVKFLQNSRVRQSPLATRRAFLKKKGLTDEEIDMAFQQSGTAADEPSSLGPATQVVPVQPPHLISQPYSPAGSRWRDYGALAIIMAGIAFGFHQLYKKYLLPLILGGREDRKQLERMEAGLSELSGSVAQTVTQLQTTLASVQELLIQQQQKIQELAHELAAAKATTSTNWILESQNINELKSEINSLKGLLLNRRQFPPSPSAPKIPSWQIPVKSPSPSSPAAVNHHSSSDISPVSNESTSSSPGKEGHSPEGSTVTYHLLGPQEEGEGVVDVKGQVRMEVQGEEEKREDKEDEEDEEDDDVSHVDEEDCLGVQREDRRGGDGQINEQVEKLRRPEGASNESERD

SEQ ID NO: 353 - protein, 336 aa, Artificial Sequence
  PEX16
MEKLRLLGLRYQEYVTRHPAATAQLETAVRGFSYLLAGRFADSHELSELVYSASNLLVLLNDGILRKELRKKLPVSLSQQKLLTWLSVLECVEVFMEMGAAKVWGEVGRWLVIALVQLAKAVLRMLLLLWFKAGLQTSPPIVPLDRETQAQPPDGDHSPGNHEQSYVGKRSNRVVRTLQNTPSLHSRHWGAPQQREGRQQQHHEELSATPTPLGLQETIAEFLYIARPLLHLLSLGLWGQRSWKPWLLAGVVDVTSLSLLSDRKGLTRRERRELRRRTILLLYYLLRSPFYDRFSEARILFLLQLLADHVPGVGLVTRPLMDYLPTWQKIYFYSWG

SEQ ID NO: 354 - protein, 299 aa, Artificial Sequence
  PEX19
MAAAEEGCSVGAEADRELEELLESALDDFDKAKPSPAPPSTTTAPDASGPQKRSPGDTAKDALFASQEKFFQELFDSELASQATAEFEKAMKELAEEEPHLVEQFQKLSEAAGRVGSDMTSQQEFTSCLKETLSGLAKNATDLQNSSMSEEELTKAMEGLGMDEGDGEGNILPIMQSIMQNLLSKDVLYPSLKEITEKYPEWLQSHRESLPPEQFEKYQEQHSVMCKICEQFEAETPTDSETTQKARFEMVLDLMQQLQDLGHPPKELAGEMPPGLNFDLDALNLSGPPGASGEQCLIM

SEQ ID NO: 355 - protein, 305 aa, Artificial Sequence
  PEX26
MKSDSSTSAAPLRGLGGPLRSSEPVRAVPARAPAVDLLEEAADLLVVHLDFRAALETCERAWQSLANHAVAEEPAGTSLEVKCSLCVVGIQALAEMDRWQEVLSWVLQYYQVPEKLPPKVLELCILLYSKMQEPGAVLDVVGAWLQDPANQNLPEYGALAEFHVQRVLLPLGCLSEAEELVVGSAAFGEERRLDVLQAIHTARQQQKQEHSGSEEAQKPNLEGSVSHKFLSLPMLVRQLWDSAVSHFFSLPFKKSLLAALILCLLVVRFDPASPSSLHFLYKLAQLFRWIRKAAFSRLYQLRIRD

SEQ ID NO: 356 - protein, 382 aa, Artificial Sequence
  AMACR
MALQGISVVELSGLAPGPFCAMVLADFGARVVRVDRPGSRYDVSRLGRGKRSLVLDLKQPRGAAVLRRLCKRSDVLLEPFRRGVMEKLQLGPEILQRENPRLIYARLSGFGQSGSFCRLAGHDINYLALSGVLSKIGRSGENPYAPLNLLADFAGGGLMCALGIIMALFDRTRTGKGQVIDANMVEGTAYLSSFLWKTQKLSLWEAPRGQNMLDGGAPFYTTYRTADGEFMAVGAIEPQFYELLIKGLGLKSDELPNQMSMDDWPEMKKKFADVFAEKTKAEWCQIFDGTDACVTPVLTFEEVVHHDHNKERGSFITSEEQDVSPRPAPLLLNTPAIPSFKRDPFIGEHTEEILEEFGFSREEIYQLNSDKIIESNKVKASL

SEQ ID NO: 357 - protein, 363 aa, Artificial Sequence
  ADA
MAQTPAFDKPKVELHVHLDGSIKPETILYYGRRRGIALPANTAEGLLNVIGMDKPLTLPDFLAKFDYYMPAIAGCREAIKRIAYEFVEMKAKEGVVYVEVRYSPHLLANSKVEPIPWNQAEGDLTPDEVVALVGQGLQEGERDFGVKARSILCCMRHQPNWSPKVVELCKKYQQQTVVAIDLAGDETIPGSSLLPGHVQAYQEAVKSGIHRTVHAGEVGSAEVVKEAVDILKTERLGHGYHTLEDQALYNRLRQENMHFEICPWSSYLTGAWKPDTEHAVIRLKNDQANYSLNTDDPLIFKSTLDTDYQMTKRDMGFTEEEFKRLNINAAKSSFLPEDEKRELLDLLYKAYGMPPSASAGQNL

SEQ ID NO: 358 - protein, 484 aa, Artificial Sequence
  ADSL
MAAGGDHGSPDSYRSPLASRYASPEMCFVFSDRYKFRTWRQLWLWLAEAEQTLGLPITDEQIQEMKSNLENIDFKMAAEEEKRLRHDVMAHVHTFGHCCPKAAGIIHLGATSCYVGDNTDLIILRNALDLLLPKLARVISRLADFAKERASLPTLGFTHFQPAQLTTVGKRCCLWIQDLCMDLQNLKRVRDDLRFRGVKGTTGTQASFLQLFEGDDHKVEQLDKMVTEKAGFKRAFIITGQTYTRKVDIEVLSVLASLGASVHKICTDIRLLANLKEMEEPFEKQQIGSSAMPYKRNPMRSERCCSLARHLMTLVMDPLQTASVQWFERTLDDSANRRICLAEAFLTADTILNTLQNISEGLVVYPKVIERRIRQELPFMATENIIMAMVKAGGSRQDCHEKIRVLSQQAASVVKQEGGDNDLIERIQVDAYFSPIHSQLDHLLDPSSFTGRASQQVQRFLEEEVYPLLKPYESVMKVKAELCL

SEQ ID NO: 359 - protein, 780 aa, Artificial Sequence
  AMPD1
MNVRIFYSVSQSPHSLLSLLFYCAILESRISATMPLFKLPAEEKQIDDAMRNFAEKVFASEVKDEGGRQEISPFDVDEICPISHHEMQAHIFHLETLSTSTEARRKKRFQGRKTVNLSIPLSETSSTKLSHIDEYISSSPTYQTVPDFQRVQITGDYASGVTVEDFEIVCKGLYRALCIREKYMQKSFQRFPKTPSKYLRNIDGEAWVANESFYPVFTPPVKKGEDPFRTDNLPENLGYHLKMKDGVVYVYPNEAAVSKDEPKPLPYPNLDTFLDDMNFLLALIAQGPVKTYTHRRLKFLSSKFQVHQMLNEMDELKELKNNPHRDFYNCRKVDTHIHAAACMNQKHLLRFIKKSYQIDADRVVYSTKEKNLTLKELFAKLKMHPYDLTVDSLDVHAGRQTFQRFDKFNDKYNPVGASELRDLYLKTDNYINGEYFATIIKEVGADLVEAKYQHAEPRLSIYGRSPDEWSKLSSWFVCNRIHCPNMTWMIQVPRIYDVFRSKNFLPHFGKMLENIFMPVFEATINPQADPELSVFLKHITGFDSVDDESKHSGHMFSSKSPKPQEWTLEKNPSYTYYAYYMYANIMVLNSLRKERGMNTFLFRPHCGEAGALTHLMTAFMIADDISHGLNLKKSPVLQYLFFLAQIPIAMSPLSNNSLFLEYAKNPFLDFLQKGLMISLSTDDPMQFHFTKEPLMEEYAIAAQVFKLSTCDMCEVARNSVLQCGISHEEKVKFLGDNYLEEGPAGNDIRRTNVAQIRMAYRYETWCYELNLIAEGLKSTE

SEQ ID NO: 360 - protein, 736 aa, Artificial Sequence
  GPHN
MATEGMILTNHDHQIRVGVLTVSDSCFRNLAEDRSGINLKDLVQDPSLLGGTISAYKIVPDEIEEIKETLIDWCDEKELNLILTTGGTGFAPRDVTPEATKEVIEREAPGMALAMLMGSLNVTPLGMLSRPVCGIRGKTLIINLPGSKKGSQECFQFILPALPHAIDLLRDAIVKVKEVHDELEDLPSPPPPLSPPPTTSPHKQTEDKGVQCEEEEEEKKDSGVASTEDSSSSHITAAAIAAKIPDSIISRGVQVLPRDTASLSTTPSESPRAQATSRLSTASCPTPKVQSRCSSKENILRASHSAVDITKVARRHRMSPFPLTSMDKAFITVLEMTPVLGTEIINYRDGMGRVLAQDVYAKDNLPPFPASVKDGYAVRAADGPGDRFIIGESQAGEQPTQTVMPGQVMRVTTGAPIPCGADAVVQVEDTELIRESDDGTEELEVRILVQARPGQDIRPIGHDIKRGECVLAKGTHMGPSEIGLLATVGVTEVEVNKFPVVAVMSTGNELLNPEDDLLPGKIRDSNRSTLLATIQEHGYPTINLGIVGDNPDDLLNALNEGISRADVIITSGGVSMGEKDYLKQVLDIDLHAQIHFGRVFMKPGLPTTFATLDIDGVRKIIFALPGNPVSAVVTCNLFVVPALRKMQGILDPRPTIIKARLSCDVKLDPRPEYHRCILTWHHQEPLPWAQSTGNQMSSRLMSMRSANGLLMLPPKTEQYVELHKGEVVDVMVIGRL

SEQ ID NO: 361 - protein, 888 aa, Artificial Sequence
  MOCOS
MAGAAAESGRELWTFAGSRDPSAPRLAYGYGPGSLRELRAREFSRLAGTVYLDHAGATLFSQSQLESFTSDLMENTYGNPHSQNISSKLTHDTVEQVRYRILAHFHTTAEDYTVIFTAGSTAALKLVAEAFPWVSQGPESSGSRFCYLTDSHTSVVGMRNVTMAINVISTPVRPEDLWSAEERSASASNPDCQLPHLFCYPAQSNFSGVRYPLSWIEEVKSGRLHPVSTPGKWFVLLDAASYVSTSPLDLSAHQADFVPISFYKIFGFPTGLGALLVHNRAAPLLRKTYFGGGTASAYLAGEDFYIPRQSVAQRFEDGTISFLDVIALKHGFDTLERLTGGMENIKQHTFTLAQYTYVALSSLQYPNGAPVVRIYSDSEFSSPEVQGPIINFNVLDDKGNIIGYSQVDKMASLYNIHLRTGCFCNTGACQRHLGISNEMVRKHFQAGHVCGDNMDLIDGQPTGSVRISFGYMSTLDDVQAFLRFIIDTRLHSSGDWPVPQAHADTGETGAPSADSQADVIPAVMGRRSLSPQEDALTGSRVWNNSSTVNAVPVAPPVCDVARTQPTPSEKAAGVLEGALGPHVVTNLYLYPIKSCAAFEVTRWPVGNQGLLYDRSWMVVNHNGVCLSQKQEPRLCLIQPFIDLRQRIMVIKAKGMEPIEVPLEENSERTQIRQSRVCADRVSTYDCGEKISSWLSTFFGRPCHLIKQSSNSQRNAKKKHGKDQLPGTMATLSLVNEAQYLLINTSSILELHRQLNTSDENGKEELFSLKDLSLRFRANIIINGKRAFEEEKWDEISIGSLRFQVLGPCHRCQMICIDQQTGQRNQHVFQKLSESRETKVNFGMYLMHASLDLSSPCFLSVGSQVLPVLKENVEGHDLPASEKHQDVTS

SEQ ID NO: 362 - protein, 636 aa, Artificial Sequence
  MOCS1
MAARPLSRMLRRLLRSSARSCSSGAPVTQPCPGESARAASEEVSRRRQFLREHAAPFSAFLTDSFGRQHSYLRISLTEKCNLRCQYCMPEEGVPLTPKANLLTTEEILTLARLFVKEGIDKIRLTGGEPLIRPDVVDIVAQLQRLEGLRTIGVTTNGINLARLLPQLQKAGLSAINISLDTLVPAKFEFIVRRKGFHKVMEGIHKAIELGYNPVKVNCVVMRGLNEDELLDFAALTEGLPLDVRFIEYMPFDGNKWNFKKMVSYKEMLDTVRQQWPELEKVPEEESSTAKAFKIPGFQGQISFITSMSEHFCGTCNRLRITADGNLKVCLFGNSEVSLRDHLRAGASEQELLRIIGAAVGRKKRQHAGMFSISQMKNRPMILIELFLMFPNSPPANPSIFSWDPLHVQGLRPRMSFSSQVATLWKGCRVPQTPPLAQQRLGSGSFQRHYTSRADSDANSKCLSPGSWASAAPSGPQLTSEQLTHVDSEGRAAMVDVGRKPDTERVAVASAVVLLGPVAFKLVQQNQLKKGDALVVAQLAGVQAAKVTSQLIPLCHHVALSHIQVQLELDSTRHAVKIQASCRARGPTGVEMEALTSAAVAALTLYDMCKAVSRDIVLEEIKLISKTGGQRGDFHRA

SEQ ID NO: 363 - protein, 289 aa, Artificial Sequence
  PNP
MENGYTYEDYKNTAEWLLSHTKHRPQVAIICGSGLGGLTDKLTQAQIFDYGEIPNFPRSTVPGHAGRLVFGFLNGRACVMMQGRFHMYEGYPLWKVTFPVRVFHLLGVDTLVVTNAAGGLNPKFEVGDIMLIRDHINLPGFSGQNPLRGPNDERFGDRFPAMSDAYDRTMRQRALSTWKQMGEQRELQEGTYVMVAGPSFETVAECRVLQKLGADAVGMSTVPEVIVARHCGLRVFGFSLITNKVIMDYESLEKANHEEVLAAGKQAAQKLEQFVSILMASIPLPDKAS

SEQ ID NO: 364 - protein, 1333 aa, Artificial Sequence
  XDH
MTADKLVFFVNGRKVVEKNADPETTLLAYLRRKLGLSGTKLGCGEGGCGACTVMLSKYDRLQNKIVHFSANACLAPICSLHHVAVTTVEGIGSTKTRLHPVQERIAKSHGSQCGFCTPGIVMSMYTLLRNQPEPTMEEIENAFQGNLCRCTGYRPILQGFRTFARDGGCCGGDGNNPNCCMNQKKDHSVSLSPSLFKPEEFTPLDPTQEPIFPPELLRLKDTPRKQLRFEGERVTWIQASTLKELLDLKAQHPDAKLVVGNTEIGIEMKFKNMLFPMIVCPAWIPELNSVEHGPDGISFGAACPLSIVEKTLVDAVAKLPAQKTEVFRGVLEQLRWFAGKQVKSVASVGGNIITASPISDLNPVFMASGAKLTLVSRGTRRTVQMDHTFFPGYRKTLLSPEEILLSIEIPYSREGEYFSAFKQASRREDDIAKVTSGMRVLFKPGTTEVQELALCYGGMANRTISALKTTQRQLSKLWKEELLQDVCAGLAEELHLPPDAPGGMVDFRCTLTLSFFFKFYLTVLQKLGQENLEDKCGKLDPTFASATLLFQKDPPADVQLFQEVPKGQSEEDMVGRPLPHLAADMQASGEAVYCDDIPRYENELSLRLVTSTRAHAKIKSIDTSEAKKVPGFVCFISADDVPGSNITGICNDETVFAKDKVTCVGHIIGAVVADTPEHTQRAAQGVKITYEELPAIITIEDAIKNNSFYGPELKIEKGDLKKGFSEADNVVSGEIYIGGQEHFYLETHCTIAVPKGEAGEMELFVSTQNTMKTQSFVAKMLGVPANRIVVRVKRMGGGFGGKETRSTVVSTAVALAAYKTGRPVRCMLDRDEDMLITGGRHPFLARYKVGFMKTGTVVALEVDHFSNVGNTQDLSQSIMERALFHMDNCYKIPNIRGTGRLCKTNLPSNTAFRGFGGPQGMLIAECWMSEVAVTCGMPAEEVRRKNLYKEGDLTHFNQKLEGFTLPRCWEECLASSQYHARKSEVDKFNKENCWKKRGLCIIPTKFGISFTVPFLNQAGALLHVYTDGSVLLTHGGTEMGQGLHTKMVQVASRALKIPTSKIYISETSTNTVPNTSPTAASVSADLNGQAVYAACQTILKRLEPYKKKNPSGSWEDWVTAAYMDTVSLSATGFYRTPNLGYSFETNSGNPFHYFSYGVACSEVEIDCLTGDHKNLRTDIVMDVGSSLNPAIDIGQVEGAFVQGLGLFTLEELHYSPEGSLHTRGPSTYKIPAFGSIPIEFRVSLLRDCPNKKAIYASKAVGEPPLFLAASIFFAIKDAIRAARAQHTGNNVKELFRLDSPATPEKIRNACVDKFTTLCVTGVPENCKPWSVRV

SEQ ID NO: 365 - protein, 545 aa, Artificial Sequence
  SUOX
MLLLHRAVVLRLQQACRLKSIPSRICIQACSTNDSFQPQRPSLTFSGDNSSTQGWRVMGTLLGLGAVLAYQDHRCRAAQESTHIYTKEEVSSHTSPETGIWVTLGSEVFDVTEFVDLHPGGPSKLMLAAGGPLEPFWALYAVHNQSHVRELLAQYKIGELNPEDKVAPTVETSDPYADDPVRHPALKVNSQRPFNAEPPPELLTENYITPNPIFFTRNHLPVPNLDPDTYRLHVVGAPGGQSLSLSLDDLHNFPRYEITVTLQCAGNRRSEMTQVKEVKGLEWRTGAISTARWAGARLCDVLAQAGHQLCETEAHVCFEGLDSDPTGTAYGASIPLARAMDPEAEVLLAYEMNGQPLPRDHGFPVRVVVPGVVGARHVKWLGRVSVQPEESYSHWQRRDYKGFSPSVDWETVDFDSAPSIQELPVQSAITEPRDGETVESGEVTIKGYAWSGGGRAVIRVDVSLDGGLTWQVAKLDGEEQRPRKAWAWRLWQLKAPVPAGQKELNIVCKAVDDGYNVQPDTVAPIWNLRGVLSNAWHRVHVYVSP

SEQ ID NO: 366 - protein, 1023 aa, Artificial Sequence
  OGDH
MFHLRTCAAKLRPLTASQTVKTFSQNRPAAARTFQQIRCYSAPVAAEPFLSGTSSNYVEEMYCAWLENPKSVHKSWDIFFRNTNAGAPPGTAYQSPLPLSRGSLAAVAHAQSLVEAQPNVDKLVEDHLAVQSLIRAYQIRGHHVAQLDPLGILDADLDSSVPADIISSTDKLGFYGLDESDLDKVFHLPTTTFIGGQESALPLREIIRRLEMAYCQHIGVEFMFINDLEQCQWIRQKFETPGIMQFTNEEKRTLLARLVRSTRFEEFLQRKWSSEKRFGLEGCEVLIPALKTIIDKSSENGVDYVIMGMPHRGRLNVLANVIRKELEQIFCQFDSKLEAADEGSGDVKYHLGMYHRRINRVTDRNITLSLVANPSHLEAADPVVMGKTKAEQFYCGDTEGKKVMSILLHGDAAFAGQGIVYETFHLSDLPSYTTHGTVHVVVNNQIGFTTDPRMARSSPYPTDVARVVNAPIFHVNSDDPEAVMYVCKVAAEWRSTFHKDVVVDLVCYRRNGHNEMDEPMFTQPLMYKQIRKQKPVLQKYAELLVSQGVVNQPEYEEEISKYDKICEEAFARSKDEKILHIKHWLDSPWPGFFTLDGQPRSMSCPSTGLTEDILTHIGNVASSVPVENFTIHGGLSRILKTRGEMVKNRTVDWALAEYMAFGSLLKEGIHIRLSGQDVERGTFSHRHHVLHDQNVDKRTCIPMNHLWPNQAPYTVCNSSLSEYGVLGFELGFAMASPNALVLWEAQFGDFHNTAQCIIDQFICPGQAKWVRQNGIVLLLPHGMEGMGPEHSSARPERFLQMCNDDPDVLPDLKEANFDINQLYDCNWVVVNCSTPGNFFHVLRRQILLPFRKPLIIFTPKSLLRHPEARSSFDEMLPGTHFQRVIPEDGPAAQNPENVKRLLFCTGKVYYDLTRERKARDMVGQVAITRIEQLSPFPFDLLLKEVQKYPNAELAWCQEEHKNQGYYDYVKPRLRTTISRAKPVWYAGRDPAAAPATGNKKTHLTELQRLLDTAFDLDVFKNFS

SEQ ID NO: 367 - protein, 320 aa, Artificial Sequence
  SLC25A19
MVGYDPKPDGRNNTKFQVAVAGSVSGLVTRALISPFDVIKIRFQLQHERLSRSDPSAKYHGILQASRQILQEEGPTAFWKGHVPAQILSIGYGAVQFLSFEMLTELVHRGSVYDAREFSVHFVCGGLAACMATLTVHPVDVLRTRFAAQGEPKVYNTLRHAVGTMYRSEGPQVFYKGLAPTLIAIFPYAGLQFSCYSSLKHLYKWAIPAEGKKNENLQNLLCGSGAGVISKTLTYPLDLFKKRLQVGGFEHARAAFGQVRRYKGLMDCAKQVLQKEGALGFFKGLSPSLLKAALSTGFMFFSYEFFCNVFHCMNRTASQR

SEQ ID NO: 368 - protein, 919 aa, Artificial Sequence
  DHTKD1
MASATAAAARRGLGRALPLFWRGYQTERGVYGYRPRKPESREPQGALERPPVDHGLARLVTVYCEHGHKAAKINPLFTGQALLENVPEIQALVQTLQGPFHTAGLLNMGKEEASLEEVLVYLNQIYCGQISIETSQLQSQDEKDWFAKRFEELQKETFTTEERKHLSKLMLESQEFDHFLATKFSTVKRYGGEGAESMMGFFHELLKMSAYSGITDVIIGMPHRGRLNLLTGLLQFPPELMFRKMRGLSEFPENFSATGDVLSHLTSSVDLYFGAHHPLHVTMLPNPSHLEAVNPVAVGKTRGRQQSRQDGDYSPDNSAQPGDRVICLQVHGDASFCGQGIVPETFTLSNLPHFRIGGSVHLIVNNQLGYTTPAERGRSSLYCSDIGKLVGCAIIHVNGDSPEEVVRATRLAFEYQRQFRKDVIIDLLCYRQWGHNELDEPFYTNPIMYKIIRARKSIPDTYAEHLIAGGLMTQEEVSEIKSSYYAKLNDHLNNMAHYRPPALNLQAHWQGLAQPEAQITTWSTGVPLDLLRFVGMKSVEVPRELQMHSHLLKTHVQSRMEKMMDGIKLDWATAEALALGSLLAQGFNVRLSGQDVGRGTFSQRHAIVVCQETDDTYIPLNHMDPNQKGFLEVSNSPLSEEAVLGFEYGMSIESPKLLPLWEAQFGDFFNGAQIIFDTFISGGEAKWLLQSGIVILLPHGYDGAGPDHSSCRIERFLQMCDSAEEGVDGDTVNMFVVHPTTPAQYFHLLRRQMVRNFRKPLIVASPKMLLRLPAAVSTLQEMAPGTTFNPVIGDSSVDPKKVKTLVFCSGKHFYSLVKQRESLGAKKHDFAIIRVEELCPFPLDSLQQEMSKYKHVKDHIWSQEEPQNMGPWSFVSPRFEKQLACKLRLVGRPPLPVPAVGIGTVHLHQHEDILAKTFA

SEQ ID NO: 369 - protein, 568 aa, Artificial Sequence [sequence omitted]

SEQ ID NO: 370 - protein, 510 aa, Artificial Sequence
  FH
MYRALRLLARSRPLVRAPAAALASAPGLGGAAVPSFWPPNAARMASQNSFRIEYDTFGELKVPNDKYYGAQTVRSTMNFKIGGVTERMPTPVIKAFGILKRAAAEVNQDYGLDPKIANAIMKAADEVAEGKLNDHFPLVVWQTGSGTQTNMNVNEVISNRAIEMLGGELGSKIPVHPNDHVNKSQSSNDTFPTAMHIAAAIEVHEVLLPGLQKLHDALDAKSKEFAQIIKIGRTHTQDAVPLTLGQEFSGYVQQVKYAMTRIKAAMPRIYELAAGGTAVGTGLNTRIGFAEKVAAKVAALTGLPFVTAPNKFEALAAHDALVELSGAMNTTACSLMKIANDIRFLGSGPRSGLGELILPENEPGSSIMPGKVNPTQCEAMTMVAAQVMGNHVAVTVGGSNGHFELNVFKPMMIKNVLHSARLLGDASVSFTENCVVGIQANTERINKLMNESLMLVTALNPHIGYDKAAKIAKTAHKNGSTLKETAIELGYLTAEQFDEWVKPKDMLGPK

SEQ ID NO: 371 - protein, 647 aa, Artificial Sequence
  DLAT
MWRVCARRAQNVAPWAGLEARWTALQEVPGTPRVTSRSGPAPARRNSVTTGYGGVRALCGWTPSSGATPRNRLLLQLLGSPGRRYYSLPPHQKVPLPSLSPTMQAGTIARWEKKEGDKINEGDLIAEVETDKATVGFESLEECYMAKILVAEGTRDVPIGAIICITVGKPEDIEAFKNYTLDSSAAPTPQAAPAPTPAATASPPTPSAQAPGSSYPPHMQVLLPALSPTMTMGTVQRWEKKVGEKLSEGDLLAEIETDKATIGFEVQEEGYLAKILVPEGTRDVPLGTPLCIIVEKEADISAFADYRPTEVTDLKPQVPPPTPPPVAAVPPTPQPLAPTPSAPCPATPAGPKGRVFVSPLAKKLAVEKGIDLTQVKGTGPDGRITKKDIDSFVPSKVAPAPAAVVPPTGPGMAPVPTGVFTDIPISNIRRVIAQRLMQSKQTIPHYYLSIDVNMGEVLLVRKELNKILEGRSKISVNDFIIKASALACLKVPEANSSWMDTVIRQNHVVDVSVAVSTPAGLITPIVFNAHIKGVETIANDVVSLATKAREGKLQPHEFQGGTFTISNLGMFGIKNFSAIINPPQACILAIGASEDKLVPADNEKGFDVASMMSVTLSCDHRVVDGAVGAQWLAEFRKYLEKPITMLL

SEQ ID NO: 372 - protein, 109 aa, Artificial Sequence
  MPC1
MAGALVRKAADYVRSKDFRDYLMSTHFWGPVANWGLPIAAINDMKKSPEIISGRMTFALCCYSLTFMRFAYKVQPRNWLLFACHATNEVAQLIQGGRLIKHEMTKTASA

SEQ ID NO: 373 - protein, 390 aa, Artificial Sequence
  PDHA1
MRKMLAAVSRVLSGASQKPASRVLVASRNFANDATFEIKKCDLHRLEEGPPVTTVLTREDGLKYYRMMQTVRRMELKADQLYKQKIIRGFCHLCDGQEACCVGLEAGINPTDHLITAYRAHGFTFTRGLSVREILAELTGRKGGCAKGKGGSMHMYAKNFYGGNGIVGAQVPLGAGIALACKYNGKDEVCLTLYGDGAANQGQIFEAYNMAALWKLPCIFICENNRYGMGTSVERAAASTDYYKRGDFIPGLRVDGMDILCVREATRFAAAYCRSGKGPILMELQTYRYHGHSMSDPGVSYRTREEIQEVRSKSDPIMLLKDRMVNSNLASVEELKEIDVEVRKEIEDAAQFATADPEPPLEELGYHIYSSDPPFEVRGANQWIKFKSVS

SEQ ID NO: 374 - protein, 359 aa, Artificial Sequence
  PDHB
MAAVSGLVRRPLREVSGLLKRRFHWTAPAALQVTVRDAINQGMDEELERDEKVFLLGEEVAQYDGAYKVSRGLWKKYGDKRIIDTPISEMGFAGIAVGAAMAGLRPICEFMTFNFSMQAIDQVINSAAKTYYMSGGLQPVPIVFRGPNGASAGVAAQHSQCFAAWYGHCPGLKVVSPWNSEDAKGLIKSAIRDNNPVVVLENELMYGVPFEFPPEAQSKDFLIPIGKAKIERQGTHITVVSHSRPVGHCLEAAAVLSKEGVECEVINMRTIRPMDMETIEASVMKTNHLVTVEGGWPQFGVGAEICARIMEGPAFNFLDAPAVRVTGADVPMPYAKILEDNSIPQVKDIIFAIKKTLNI

SEQ ID NO: 375 - protein, 501 aa, Artificial Sequence
  PDHX
MAASWRLGCDPRLLRYLVGFPGRRSVGLVKGALGWSVSRGANWRWFHSTQWLRGDPIKILMPSLSPTMEEGNIVKWLKKEGEAVSAGDALCEIETDKAVVTLDASDDGILAKIVVEEGSKNIRLGSLIGLIVEEGEDWKHVEIPKDVGPPPPVSKPSEPRPSPEPQISIPVKKEHIPGTLRFRLSPAARNILEKHSLDASQGTATGPRGIFTKEDALKLVQLKQTGKITESRPTPAPTATPTAPSPLQATAGPSYPRPVIPPVSTPGQPNAVGTFTEIPASNIRRVIAKRLTESKSTVPHAYATADCDLGAVLKVRQDLVKDDIKVSVNDFIIKAAAVTLKQMPDVNVSWDGEGPKQLPFIDISVAVATDKGLLTPIIKDAAAKGIQEIADSVKALSKKARDGKLLPEEYQGGSFSISNLGMFGIDEFTAVINPPQACILAVGRFRPVLKLTEDEEGNAKLQQRQLITVTMSSDSRVVDDELATRFLKSFKANLENPIRLA

SEQ ID NO: 376 - protein, 537 aa, Artificial Sequence
  PDP1
MPAPTQLFFPLIRNCELSRIYGTACYCHHKHLCCSSSYIPQSRLRYTPHPAYATFCRPKENWWQYTQGRRYASTPQKFYLTPPQVNSILKANEYSFKVPEFDGKNVSSILGFDSNQLPANAPIEDRRSAATCLQTRGMLLGVFDGHAGCACSQAVSERLFYYIAVSLLPHETLLEIENAVESGRALLPILQWHKHPNDYFSKEASKLYFNSLRTYWQELIDLNTGESTDIDVKEALINAFKRLDNDISLEAQVGDPNSFLNYLVLRVAFSGATACVAHVDGVDLHVANTGDSRAMLGVQEEDGSWSAVTLSNDHNAQNERELERLKLEHPKSEAKSVVKQDRLLGLLMPFRAFGDVKFKWSIDLQKRVIESGPDQLNDNEYTKFIPPNYHTPPYLTAEPEVTYHRLRPQDKFLVLATDGLWETMHRQDVVRIVGEYLTGMHHQQPIAVGGYKVTLGQMHGLLTERRTKMSSVFEDQNAATHLIRHAVGNNEFGTVDHERLSKMLSLPEELARMYRDDITIIVVQFNSHVVGAYQNQE

SEQ ID NO: 377 - protein, 1545 aa, Artificial Sequence
  ABCC2
MLEKFCNSTFWNSSFLDSPEADLPLCFEQTVLVWIPLGYLWLLAPWQLLHVYKSRTKRSSTTKLYLAKQVFVGFLLILAAIELALVLTEDSGQATVPAVRYTNPSLYLGTWLLVLLIQYSRQWCVQKNSWFLSLFWILSILCGTFQFQTLIRTLLQGDNSNLAYSCLFFISYGFQILILIFSAFSENNESSNNPSSIASFLSSITYSWYDSIILKGYKRPLTLEDVWEVDEEMKTKTLVSKFETHMKRELQKARRALQRRQEKSSQQNSGARLPGLNKNQSQSQDALVLEDVEKKKKKSGTKKDVPKSWLMKALFKTFYMVLLKSFLLKLVNDIFTFVSPQLLKLLISFASDRDTYLWIGYLCAILLFTAALIQSFCLQCYFQLCFKLGVKVRTAIMASVYKKALTLSNLARKEYTVGETVNLMSVDAQKLMDVTNFMHMLWSSVLQIVLSIFFLWRELGPSVLAGVGVMVLVIPINAILSTKSKTIQVKNMKNKDKRLKIMNEILSGIKILKYFAWEPSFRDQVQNLRKKELKNLLAFSQLQCVVIFVFQLTPVLVSVVTFSVYVLVDSNNILDAQKAFTSITLFNILRFPLSMLPMMISSMLQASVSTERLEKYLGGDDLDTSAIRHDCNFDKAMQFSEASFTWEHDSEATVRDVNLDIMAGQLVAVIGPVGSGKSSLISAMLGEMENVHGHITIKGTTAYVPQQSWIQNGTIKDNILFGTEFNEKRYQQVLEACALLPDLEMLPGGDLAEIGEKGINLSGGQKQRISLARATYQNLDIYLLDDPLSAVDAHVGKHIFNKVLGPNGLLKGKTRLLVTHSMHFLPQVDEIVVLGNGTIVEKGSYSALLAKKGEFAKNLKTFLRHTGPEEEATVHDGSEEEDDDYGLISSVEEIPEDAASITMRRENSFRRTLSRSSRSNGRHLKSLRNSLKTRNVNSLKEDEELVKGQKLIKKEFIETGKVKFSIYLEYLQAIGLFSIFFIILAFVMNSVAFIGSNLWLSAWTSDSKIFNSTDYPASQRDMRVGVYGALGLAQGIFVFIAHFWSAFGFVHASNILHKQLLNNILRAPMRFFDTTPTGRIVNRFAGDISTVDDTLPQSLRSWITCFLGIISTLVMICMATPVFTIIVIPLGIIYVSVQMFYVSTSRQLRRLDSVTRSPIYSHFSETVSGLPVIRAFEHQQRFLKHNEVRIDTNQKCVFSWITSNRWLAIRLELVGNLTVFFSALMMVIYRDTLSGDTVGFVLSNALNITQTLNWLVRMTSEIETNIVAVERITEYTKVENEAPWVTDKRPPPDWPSKGKIQFNNYQVRYRPELDLVLRGITCDIGSMEKIGVVGRTGAGKSSLTNCLFRILEAAGGQIIIDGVDIASIGLHDLREKLTIIPQDPILFSGSLRMNLDPFNNYSDEEIWKALELAHLKSFVASLQLGLSHEVTEAGGNLSIGQRQLLCLGRALLRKSKILVLDEATAAVDLETDNLIQTTIQNEFAHCTVITIAHRLHTIMDSDKVMVLDNGKIIECGSPEELLQIPGPFYFMAKEAGIENVNSTKF

SEQ ID NO: 378 - protein, 691 aa, Artificial Sequence
  SLCO1B1
MDQNQHLNKTAEAQPSENKKTRYCNGLKMFLAALSLSFIAKTLGAIIMKSSIIHIERRFEISSSLVGFIDGSFEIGNLLVIVFVSYFGSKLHRPKLIGIGCFIMGIGGVLTALPHFFMGYYRYSKETNINSSENSTSTLSTCLINQILSLNRASPEIVGKGCLKESGSYMWIYVFMGNMLRGIGETPIVPLGLSYIDDFAKEGHSSLYLGILNAIAMIGPIIGFTLGSLFSKMYVDIGYVDLSTIRITPTDSRWVGAWWLNFLVSGLFSIISSIPFFFLPQTPNKPQKERKASLSLHVLETNDEKDQTANLTNQGKNITKNVTGFFQSFKSILTNPLYVMFVLLTLLQVSSYIGAFTYVFKYVEQQYGQPSSKANILLGVITIPIFASGMFLGGYIIKKFKLNTVGIAKFSCFTAVMSLSFYLLYFFILCENKSVAGLTMTYDGNNPVTSHRDVPLSYCNSDCNCDESQWEPVCGNNGITYISPCLAGCKSSSGNKKPIVFYNCSCLEVTGLQNRNYSAHLGECPRDDACTRKFYFFVAIQVLNLFFSALGGTSHVMLIVKIVQPELKSLALGFHSMVIRALGGILAPIYFGALIDTTCIKWSTNNCGTRGSCRTYNSTSFSRVYLGLSSMLRVSSLVLYIILIYAMKKKYQEKDINASENGSVMDEANLESLNKNKHFVPSAGADSETHC

SEQ ID NO: 379 - protein, 702 aa, Artificial Sequence
  SLCO1B3
MDQHQHLNKTAESASSEKKKTRRCNGFKMFLAALSFSYIAKALGGIIMKISITQIERRFDISSSLAGLIDGSFEIGNLLVIVFVSYFGSKLHRPKLIGIGCLLMGTGSILTSLPHFFMGYYRYSKETHINPSENSTSSLSTCLINQTLSFNGTSPEIVEKDCVKESGSHMWIYVFMGNMLRGIGETPIVPLGISYIDDFAKEGHSSLYLGSLNAIGMIGPVIGFALGSLFAKMYVDIGYVDLSTIRITPKDSRWVGAWWLGFLVSGLFSIISSIPFFFLPKNPNKPQKERKISLSLHVLKTNDDRNQTANLTNQGKNVTKNVTGFFQSLKSILTNPLYVIFLLLTLLQVSSFIGSFTYVFKYMEQQYGQSASHANFLLGIITIPTVATGMFLGGFIIKKFKLSLVGIAKFSFLTSMISFLFQLLYFPLICESKSVAGLTLTYDGNNSVASHVDVPLSYCNSECNCDESQWEPVCGNNGITYLSPCLAGCKSSSGIKKHTVFYNCSCVEVTGLQNRNYSAHLGECPRDNTCTRKFFIYVAIQVINSLFSATGGTTFILLTVKIVQPELKALAMGFQSMVIRTLGGILAPIYFGALIDKTCMKWSTNSCGAQGACRIYNSVFFGRVYLGLSIALRFPALVLYIVFIFAMKKKFQGKDTKASDNERKVMDEANLEFLNNGEHFVPSAGTDSKTCNLDMQDNAAAN

SEQ ID NO: 380 - protein, 426 aa, Artificial Sequence; identical to SEQ ID NO: 135
  HFE2

SEQ ID NO: 381 - protein, 1427 aa, Artificial Sequence
  ADAMTS13
MHQRHPRARCPPLCVAGILACGFLLGCWGPSHFQQSCLQALEPQAVSSYLSPGAPLKGRPPSPGFQRQRQRQRRAAGGILHLELLVAVGPDVFQAHQEDTERYVLTNLNIGAELLRDPSLGAQFRVHLVKMVILTEPEGAPNITANLTSSLLSVCGWSQTINPEDDTDPGHADLVLYITRFDLELPDGNRQVRGVTQLGGACSPTWSCLITEDTGFDLGVTIAHEIGHSFGLEHDGAPGSGCGPSGHVMASDGAAPRAGLAWSPCSRRQLLSLLSAGRARCVWDPPRPQPGSAGHPPDAQPGLYYSANEQCRVAFGPKAVACTFAREHLDMCQALSCHTDPLDQSSCSRLLVPLLDGTECGVEKWCSKGRCRSLVELTPIAAVHGRWSSWGPRSPCSRSCGGGVVTRRRQCNNPRPAFGGRACVGADLQAEMCNTQACEKTQLEFMSQQCARTDGQPLRSSPGGASFYHWGAAVPHSQGDALCRHMCRAIGESFIMKRGDSFLDGTRCMPSGPREDGTLSLCVSGSCRTFGCDGRMDSQQVWDRCQVCGGDNSTCSPRKGSFTAGRAREYVTFLTVTPNLTSVYIANHRPLFTHLAVRIGGRYVVAGKMSISPNTTYPSLLEDGRVEYRVALTEDRLPRLEEIRIWGPLQEDADIQVYRRYGEEYGNLTRPDITFTYFQPKPRQAWVWAAVRGPCSVSCGAGLRWVNYSCLDQARKELVETVQCQGSQQPPAWPEACVLEPCPPYWAVGDFGPCSASCGGGLRERPVRCVEAQGSLLKTLPPARCRAGAQQPAVALETCNPQPCPARWEVSEPSSCTSAGGAGLALENETCVPGADGLEAPVTEGPGSVDEKLPAPEPCVGMSCPPGWGHLDATSAGEKAPSPWGSIRTGAQAAHVWTPAAGSCSVSCGRGLMELRFLCMDSALRVPVQEELCGLASKPGSRREVCQAVPCPARWQYKLAACSVSCGRGVVRRILYCARAHGEDDGEEILLDTQCQGLPRPEPQEACSLEPCPPRWKVMSLGPCSASCGLGTARRSVACVQLDQGQDVEVDEAACAALVRPEASVPCLIADCTYRWHVGTWMECSVSCGDGIQRRRDTCLGPQAQAPVPADFCQHLPKPVTVRGCWAGPCVGQGTPSLVPHEEAAAPGRTTATPAGASLEWSQARGLLFSPAPQPRRLLPGPQENSVQSSACGRQHLEPTGTIDMRGPGQADCAVAIGRPLGEVVTLRVLESSLNCSAGDMLLLWGRLTWRKMCRKLLDMTFSSKTNTLVVRQRCGRPGGGVLLRYGSQLAPETFYRECDMQLFGPWGEIVSPSLSPATSNAGGCRLFINVAPHARIAIHALATNMGAGTEGANASYILIRDTHSLRTTAFHGQQVLYWESESSQAEMEFSEGFLKAQASLRGQYWTLQSWVPEMQDPQSWKGKEGT

SEQ ID NO: 382 - protein, 842 aa, Artificial Sequence
  PYGM
MSRPLSDQEKRKQISVRGLAGVENVTELKKNFNRHLHFTLVKDRNVATPRDYYFALAHTVRDHLVGRWIRTQQHYYEKDPKRIYYLSLEFYMGRTLQNTMVNLALENACDEATYQLGLDMEELEEIEEDAGLGNGGLGRLAACFLDSMATLGLAAYGYGIRYEFGIFNQKISGGWQMEEADDWLRYGNPWEKARPEFTLPVHFYGHVEHTSQGAKWVDTQVVLAMPYDTPVPGYRNNVVNTMRLWSAKAPNDFNLKDFNVGGYIQAVLDRNLAENISRVLYPNDNFFEGKELRLKQEYFVVAATLQDIIRRFKSSKFGCRDPVRTNFDAFPDKVAIQLNDTHPSLAIPELMRILVDLERMDWDKAWDVTVRTCAYTNHTVLPEALERWPVHLLETLLPRHLQIIYEINQRFLNRVAAAFPGDVDRLRRMSLVEEGAVKRINMAHLCIAGSHAVNGVARIHSEILKKTIFKDFYELEPHKFQNKTNGITPRRWLVLCNPGLAEVIAERIGEDFISDLDQLRKLLSFVDDEAFIRDVAKVKQENKLKFAAYLEREYKVHINPNSLFDIQVKRIHEYKRQLLNCLHVITLYNRIKREPNKFFVPRTVMIGGKAAPGYHMAKMIIRLVTAIGDVVNHDPAVGDRLRVIFLENYRVSLAEKVIPAADLSEQISTAGTEASGTGNMKFMLNGALTIGTMDGANVEMAEEAGEENFFIFGMRVEDVDKLDQRGYNAQEYYDRIPELRQVIEQLSSGFFSPKQPDLFKDIVNMLMHHDRFKVFADYEDYIKCQEKVSALYKNPREWTRMVIRNIATSGKFSSDRTIAQYAREIWGVEPSRQRLPAPDEAI

SEQ ID NO: 383 - protein, 1366 aa, Artificial Sequence
  COL1A2
MLSFVDTRTLLLLAVTLCLATCQSLQEETVRKGPAGDRGPRGERGPPGPPGRDGEDGPTGPPGPPGPPGPPGLGGNFAAQYDGKGVGLGPGPMGLMGPRGPPGAAGAPGPQGFQGPAGEPGEPGQTGPAGARGPAGPPGKAGEDGHPGKPGRPGERGVVGPQGARGFPGTPGLPGFKGIRGHNGLDGLKGQPGAPGVKGEPGAPGENGTPGQTGARGLPGERGRVGAPGPAGARGSDGSVGPVGPAGPIGSAGPPGFPGAPGPKGEIGAVGNAGPAGPAGPRGEVGLPGLSGPVGPPGNPGANGLTGAKGAAGLPGVAGAPGLPGPRGIPGPVGAAGATGARGLVGEPGPAGSKGESGNKGEPGSAGPQGPPGPSGEEGKRGPNGEAGSAGPPGPPGLRGSPGSRGLPGADGRAGVMGPPGSRGASGPAGVRGPNGDAGRPGEPGLMGPRGLPGSPGNIGPAGKEGPVGLPGIDGRPGPIGPAGARGEPGNIGFPGPKGPTGDPGKNGDKGHAGLAGARGAPGPDGNNGAQGPPGPQGVQGGKGEQGPPGPPGFQGLPGPSGPAGEVGKPGERGLHGEFGLPGPAGPRGERGPPGESGAAGPTGPIGSRGPSGPPGPDGNKGEPGVVGAVGTAGPSGPSGLPGERGAAGIPGGKGEKGEPGLRGEIGNPGRDGARGAPGAVGAPGPAGATGDRGEAGAAGPAGPAGPRGSPGERGEVGPAGPNGFAGPAGAAGQPGAKGERGAKGPKGENGVVGPTGPVGAAGPAGPNGPPGPAGSRGDGGPPGMTGFPGAAGRTGPPGPSGISGPPGPPGPAGKEGLRGPRGDQGPVGRTGEVGAVGPPGFAGEKGPSGEAGTAGPPGTPGPQGLLGAPGILGLPGSRGERGLPGVAGAVGEPGPLGIAGPPGARGPPGAVGSPGVNGAPGEAGRDGNPGNDGPPGRDGQPGHKGERGYPGNIGPVGAAGAPGPHGPVGPAGKHGNRGETGPSGPVGPAGAVGPRGPSGPQGIRGDKGEPGEKGPRGLPGLKGHNGLQGLPGIAGHHGDQGAPGSVGPAGPRGPAGPSGPAGKDGRTGHPGTVGPAGIRGPQGHQGPAGPPGPPGPPGPPGVSGGGYDFGYDGDFYRADQPRSAPSLRPKDYEVDATLKSLNNQIETLLTPEGSRKNPARTCRDLRLSHPEWSSGYYWIDPNQGCTMDAIKVYCDFSTGETCIRAQPENIPAKNWYRSSKDKKHVWLGETINAGSQFEYNVEGVTSKEMATQLAFMRLLANYASQNITYHCKNSIAYMDEETGNLKKAVILQGSNDVELVAEGNSRFTYTVLVDGCSKKTNEWGKTIIEYKTNKPSRLPFLDIAPLDIGGADQEFFVDIGPVCFK

SEQ ID NO: 384 - protein, 401 aa, Artificial Sequence
  TNFRSF11B
MNNLLCCALVFLDISIKWTTQETFPPKYLHYDEETSHQLLCDKCPPGTYLKQHCTAKWKTVCAPCPDHYYTDSWHTSDECLYCSPVCKELQYVKQECNRTHNRVCECKEGRYLEIEFCLKHRSCPPGFGVVQAGTPERNTVCKRCPDGFFSNETSSKAPCRKHTNCSVFGLLLTQKGNATHDNICSGNSESTQKCGIDVTLCEEAFFRFAVPTKFTPNWLSVLVDNLPGTKVNAESVERIKRQHSSQEQTFQLLKLWKHQNKDQDIVKKIIQDIDLCENSVQRHIGHANLTFEQLRSLMESLPGKKVGAEDIEKTIKACKPSDQILKLLSLWRIKNGDQDTLKGLMHALKHSKTYHFPKTVTQSLKKTIRFLHSFTMYKLYQKLFLEMIGNQVQSVKISCL

SEQ ID NO: 385 - protein, 1164 aa, Artificial Sequence
  TSC1
MAQQANVGELLAMLDSPMLGVRDDVTAVFKENLNSDRGPMLVNTLVDYYLETSSQPALHILTTLQEPHDKHLLDRINEYVGKAATRLSILSLLGHVIRLQPSWKHKLSQAPLLPSLLKCLKMDTDVVVLTTGVLVLITMLPMIPQSGKQHLLDFFDIFGRLSSWCLKKPGHVAEVYLVHLHASVYALFHRLYGMYPCNFVSFLRSHYSMKENLETFEEVVKPMMEHVRIHPELVTGSKDHELDPRRWKRLETHDVVIECAKISLDPTEASYEDGYSVSHQISARFPHRSADVTTSPYADTQNSYGCATSTPYSTSRLMLLNMPGQLPQTLSSPSTRLITEPPQATLWSPSMVCGMTTPPTSPGNVPPDLSHPYSKVFGTTAGGKGTPLGTPATSPPPAPLCHSDDYVHISLPQATVTPPRKEERMDSARPCLHRQHHLLNDRGSEEPPGSKGSVTLSDLPGFLGDLASEEDSIEKDKEEAAISRELSEITTAEAEPVVPRGGFDSPFYRDSLPGSQRKTHSAASSSQGASVNPEPLHSSLDKLGPDTPKQAFTPIDLPCGSADESPAGDRECQTSLETSIFTPSPCKIPPPTRVGFGSGQPPPYDHLFEVALPKTAHHFVIRKTEELLKKAKGNTEEDGVPSTSPMEVLDRLIQQGADAHSKELNKLPLPSKSVDWTHFGGSPPSDEIRTLRDQLLLLHNQLLYERFKRQQHALRNRRLLRKVIKAAALEEHNAAMKDQLKLQEKDIQMWKVSLQKEQARYNQLQEQRDTMVTKLHSQIRQLQHDREEFYNQSQELQTKLEDCRNMIAELRIELKKANNKVCHTELLLSQVSQKLSNSESVQQQMEFLNRQLLVLGEVNELYLEQLQNKHSDTTKEVEMMKAAYRKELEKNRSHVLQQTQRLDTSQKRILELESHLAKKDHLLLEQKKYLEDVKLQARGQLQAAESRYEAQKRITQVFELEILDLYGRLEKDGLLKKLEEEKAEAAEAAEERLDCCNDGCSDSMVGHNEEASGHNGETKTPRPSSARGSSGSRGGGGSSSSSSELSTPEKPPHQRAGPFSSRWETTMGEASASIPTTVGSLPSSKSFLGMKARELFRNKSESQCDEDGMTSSLSESLKTELGKDLGVEAKIPLNLDGPHPSPPTPDSVGQLHIMDYNETHHEHS

SEQ ID NO: 386 - protein, 1807 aa, Artificial Sequence
  TSC2
MAKPTSKDSGLKEKFKILLGLGTPRPNPRSAEGKQTEFIITAEILRELSMECGLNNRIRMIGQICEVAKTKKFEEHAVEALWKAVADLLQPERPLEARHAVLALLKAIVQGQGERLGVLRALFFKVIKDYPSNEDLHERLEVFKALTDNGRHITYLEEELADFVLQWMDVGLSSEFLLVLVNLVKFNSCYLDEYIARMVQMICLLCVRTASSVDIEVSLQVLDAVVCYNCLPAESLPLFIVTLCRTINVKELCEPCWKLMRNLLGTHLGHSAIYNMCHLMEDRAYMEDAPLLRGAVFFVGMALWGAHRLYSLRNSPTSVLPSFYQAMACPNEVVSYEIVLSITRLIKKYRKELQVVAWDILLNIIERLLQQLQTLDSPELRTIVHDLLTTVEELCDQNEFHGSQERYFELVERCADQRPESSLLNLISYRAQSIHPAKDGWIQNLQALMERFFRSESRGAVRIKVLDVLSFVLLINRQFYEEELINSVVISQLSHIPEDKDHQVRKLATQLLVDLAEGCHTHHFNSLLDIIEKVMARSLSPPPELEERDVAAYSASLEDVKTAVLGLLVILQTKLYTLPASHATRVYEMLVSHIQLHYKHSYTLPIASSIRLQAFDFLLLLRADSLHRLGLPNKDGVVRFSPYCVCDYMEPERGSEKKTSGPLSPPTGPPGPAPAGPAVRLGSVPYSLLFRVLLQCLKQESDWKVLKLVLGRLPESLRYKVLIFTSPCSVDQLCSALCSMLSGPKTLERLRGAPEGFSRTDLHLAVVPVLTALISYHNYLDKTKQREMVYCLEQGLIHRCASQCVVALSICSVEMPDIIIKALPVLVVKLTHISATASMAVPLLEFLSTLARLPHLYRNFAAEQYASVFAISLPYTNPSKFNQYIVCLAHHVIAMWFIRCRLPFRKDFVPFITKGLRSNVLLSFDDTPEKDSFRARSTSLNERPKSLRIARPPKQGLNNSPPVKEFKESSAAEAFRCRSISVSEHVVRSRIQTSLTSASLGSADENSVAQADDSLKNLHLELTETCLDMMARYVFSNFTAVPKRSPVGEFLLAGGRTKTWLVGNKLVTVTTSVGTGTRSLLGLDSGELQSGPESSSSPGVHVRQTKEAPAKLESQAGQQVSRGARDRVRSMSGGHGLRVGALDVPASQFLGSATSPGPRTAPAAKPEKASAGTRVPVQEKTNLAAYVPLLTQGWAEILVRRPTGNTSWLMSLENPLSPFSSDINNMPLQELSNALMAAERFKEHRDTALYKSLSVPAASTAKPPPLPRSNTVASFSSLYQSSCQGQLHRSVSWADSAVVMEEGSPGEVPVLVEPPGLEDVEAALGMDRRTDAYSRSSSVSSQEEKSLHAEELVGRGIPIERVVSSEGGRPSVDLSFQPSQPLSKSSSSPELQTLQDILGDPGDKADVGRLSPEVKARSQSGTLDGESAAWSASGEDSRGQPEGPLPSSSPRSPSGLRPRGYTISDSAPSRRGKRVERDALKSRATASNAEKVPGINPSFVFLQLYHSPFFGDESNKPILLPNESQSFERSVQLLDQIPSYDTHKIAVLYVGEGQSNSELAILSNEHGSYRYTEFLTGLGRLIELKDCQPDKVYLGGLDVCGEDGQFTYCWHDDIMQAVFHIATLMPTKDVDKHRCDKKRHLGNDFVSIVYNDSGEDFKLGTIKGQFNFVHVIVTPLDYECNLVSLQCRKDMEGLVDTSVAKIVSDRNLPFVARQMALHANMASQVHHSRSNPTDIYPSKWIARLRHIKRLRQRICEEAAYSNPSLPLVHPPSHSKAPAQTPAEPTPGYEVGQRKRLISSVEDFTEFV

SEQ ID NO: 387 - protein, 475 aa, Artificial Sequence
  DHCR7
MAAKSQPNIPKAKSLDGVTNDRTASQGQWGRAWEVDWFSLASVIFLLLFAPFIVYYFIMACDQYSCALTGPVVDIVTGHARLSDIWAKTPPITRKAAQLYTLWVTFQVLLYTSLPDFCHKFLPGYVGGIQEGAVTPAGVVNKYQINGLQAWLLTHLLWFANAHLLSWFSPTIIFDNWIPLLWCANILGYAVSTFAMVKGYFFPTSARDCKFTGNFFYNYMMGIEFNPRIGKWFDFKLFFNGRPGIVAWTLINLSFAAKQRELHSHVTNAMVLVNVLQAIYVIDFFWNETWYLKTIDICHDHFGWYLGWGDCVWLPYLYTLQGLYLVYHPVQLSTPHAVGVLLLGLVGYYIFRVANHQKDLFRRTDGRCLIWGRKPKVIECSYTSADGQRHHSKLLVSGFWGVARHFNYVGDLMGSLAYCLACGGGHLLPYFYIIYMAILLTHRCLRDEHRCASKYGRDWERYTAAVPYRLLPGIF

SEQ ID NO: 388 - protein, 417 aa, Artificial Sequence
  PGK1
MSLSNKLTLDKLDVKGKRVVMRVDFNVPMKNNQITNNQRIKAAVPSIKFCLDNGAKSVVLMSHLGRPDGVPMPDKYSLEPVAVELKSLLGKDVLFLKDCVGPEVEKACANPAAGSVILLENLRFHVEEEGKGKDASGNKVKAEPAKIEAFRASLSKLGDVYVNDAFGTAHRAHSSMVGVNLPQKAGGFLMKKELNYFAKALESPERPFLAILGGAKVADKIQLINNMLDKVNEMIIGGGMAFTFLKVLNNMEIGTSLFDEEGAKIVKDLMSKAEKNGVKITLPVDFVTADKFDENAKTGQATVASGIPAGWMGLDCGPESSKKYAEAVTRAKQIVWNGPVGVFEWEAFARGTKALMDEVVKATSRGCITIIGGGDTATCCAKWNTEDKVSHVSTGGGASLELLEGKVLPGVDALSNI

SEQ ID NO: 389 - protein, 873 aa, Artificial Sequence
  VLDLR
MGTSALWALWLLLALCWAPRESGATGTGRKAKCEPSQFQCTNGRCITLLWKCDGDEDCVDGSDEKNCVKKTCAESDFVCNNGQCVPSRWKCDGDPDCEDGSDESPEQCHMRTCRIHEISCGAHSTQCIPVSWRCDGENDCDSGEDEENCGNITCSPDEFTCSSGRCISRNFVCNGQDDCSDGSDELDCAPPTCGAHEFQCSTSSCIPISWVCDDDADCSDQSDESLEQCGRQPVIHTKCPASEIQCGSGECIHKKWRCDGDPDCKDGSDEVNCPSRTCRPDQFECEDGSCIHGSRQCNGIRDCVDGSDEVNCKNVNQCLGPGKFKCRSGECIDISKVCNQEQDCRDWSDEPLKECHINECLVNNGGCSHICKDLVIGYECDCAAGFELIDRKTCGDIDECQNPGICSQICINLKGGYKCECSRGYQMDLATGVCKAVGKEPSLIFTNRRDIRKIGLERKEYIQLVEQLRNTVALDADIAAQKLFWADLSQKAIFSASIDDKVGRHVKMIDNVYNPAAIAVDWVYKTIYWTDAASKTISVATLDGTKRKFLFNSDLREPASIAVDPLSGFVYWSDWGEPAKIEKAGMNGFDRRPLVTADIQWPNGITLDLIKSRLYWLDSKLHMLSSVDLNGQDRRIVLKSLEFLAHPLALTIFEDRVYWIDGENEAVYGANKFTGSELATLVNNLNDAQDIIVYHELVQPSGKNWCEEDMENGGCEYLCLPAPQINDHSPKYTCSCPSGYNVEENGRDCQSTATTVTYSETKDTNTTEISATSGLVPGGINVTTAVSEVSVPPKGTSAAWAILPLLLLVMAAVGGYLMWRNWQHKNMKSMNFDNPVYLKTTEEDLSIDIGRHSASVGHTYPAISVVSTDDDLA

SEQ ID NO: 390 - protein, 465 aa, Artificial Sequence
  KYNU
MEPSSLELPADTVQRIAAELKCHPTDERVALHLDEEDKLRHFRECFYIPKIQDLPPVDLSLVNKDENAIYFLGNSLGLQPKMVKTYLEEELDKWAKIAAYGHEVGKRPWITGDESIVGLMKDIVGANEKEIALMNALTVNLHLLMLSFFKPTPKRYKILLEAKAFPSDHYAIESQLQLHGLNIEESMRMIKPREGEETLRIEDILEVIEKEGDSIAVILFSGVHFYTGQHFNIPAITKAGQAKGCYVGFDLAHAVGNVELYLHDWGVDFACWCSYKYLNAGAGGIAGAFIHEKHAHTIKPALVGWFGHELSTRFKMDNKLQLIPGVCGFRISNPPILLVCSLHASLEIFKQATMKALRKKSVLLTGYLEYLIKHNYGKDKAATKKPVVNIITPSHVEERGCQLTITFSVPNKDVFQELEKRGVVCDKRNPNGIRVAPVPLYNSFHDVYKFTNLLTSILDSAETKN

SEQ ID NO: 391 - protein, 2224 aa, Artificial Sequence
  F5
MFPGCPRLWVLVVLGTSWVGWGSQGTEAAQLRQFYVAAQGISWSYRPEPTNSSLNLSVTSFKKIVYREYEPYFKKEKPQSTISGLLGPTLYAEVGDIIKVHFKNKADKPLSIHPQGIRYSKLSEGASYLDHTFPAEKMDDAVAPGREYTYEWSISEDSGPTHDDPPCLTHIYYSHENLIEDFNSGLIGPLLICKKGTLTEGGTQKTFDKQIVLLFAVFDESKSWSQSSSLMYTVNGYVNGTMPDITVCAHDHISWHLLGMSSGPELFSIHFNGQVLEQNHHKVSAITLVSATSTTANMTVGPEGKWIISSLTPKHLQAGMQAYIDIKNCPKKTRNLKKITREQRRHMKRWEYFIAAEEVIWDYAPVIPANMDKKYRSQHLDNFSNQIGKHYKKVMYTQYEDESFTKHTVNPNMKEDGILGPIIRAQVRDTLKIVFKNMASRPYSIYPHGVTFSPYEDEVNSSFTSGRNNTMIRAVQPGETYTYKWNILEFDEPTENDAQCLTRPYYSDVDIMRDIASGLIGLLLICKSRSLDRRGIQRAADIEQQAVFAVFDENKSWYLEDNINKFCENPDEVKRDDPKFYESNIMSTINGYVPESITTLGFCFDDTVQWHFCSVGTQNEILTIHFTGHSFIYGKRHEDTLTLFPMRGESVTVTMDNVGTWMLTSMNSSPRSKKLRLKFRDVKCIPDDDEDSYEIFEPPESTVMATRKMHDRLEPEDEESDADYDYQNRLAAALGIRSFRNSSLNQEEEEFNLTALALENGTEFVSSNTDIIVGSNYSSPSNISKFTVNNLAEPQKAPSHQQATTAGSPLRHLIGKNSVLNSSTAEHSSPYSEDPIEDPLQPDVTGIRLLSLGAGEFKSQEHAKHKGPKVERDQAAKHRFSWMKLLAHKVGRHLSQDTGSPSGMRPWEDLPSQDTGSPSRMRPWKDPPSDLLLLKQSNSSKILVGRWHLASEKGSYEIIQDTDEDTAVNNWLISPQNASRAWGESTPLANKPGKQSGHPKFPRVRHKSLQVRQDGGKSRLKKSQFLIKTRKKKKEKHTHHAPLSPRTFHPLRSEAYNTFSERRLKHSLVLHKSNETSLPTDLNQTLPSMDFGWIASLPDHNQNSSNDTGQASCPPGLYQTVPPEEHYQTFPIQDPDQMHSTSDPSHRSSSPELSEMLEYDRSHKSFPTDISQMSPSSEHEVWQTVISPDLSQVTLSPELSQTNLSPDLSHTTLSPELIQRNLSPALGQMPISPDLSHTTLSPDLSHTTLSLDLSQTNLSPELSQTNLSPALGQMPLSPDLSHTTLSLDFSQTNLSPELSHMTLSPELSQTNLSPALGQMPISPDLSHTTLSLDFSQTNLSPELSQTNLSPALGQMPLSPDPSHTTLSLDLSQTNLSPELSQTNLSPDLSEMPLFADLSQIPLTPDLDQMTLSPDLGETDLSPNFGQMSLSPDLSQVTLSPDISDTTLLPDLSQISPPPDLDQIFYPSESSQSLLLQEFNESFPYPDLGQMPSPSSPTLNDTFLSKEFNPLVIVGLSKDGTDYIEIIPKEEVQSSEDDYAEIDYVPYDDPYKTDVRTNINSSRDPDNIAAWYLRSNNGNRRNYYIAAEEISWDYSEFVQRETDIEDSDDIPEDTTYKKVVFRKYLDSTFTKRDPRGEYEEHLGILGPIIRAEVDDVIQVRFKNLASRPYSLHAHGLSYEKSSEGKTYEDDSPEWFKEDNAVQPNSSYTYVWHATERSGPESPGSACRAWAYYSAVNPEKDIHSGLIGPLLICQKGILHKDSNMPMDMREFVLLFMTFDEKKSWYYEKKSRSSWRLTSSEMKKSHEFHAINGMIYSLPGLKMYEQEWVRLHLLNIGGSQDIHVVHFHGQTLLENGNKQHQLGVWPLLPGSFKTLEMKASKPGWWLLNTEVGENQRAGMQTPFLIMDRDCRMPMGLSTGIISDSQIKASEFLGYWEPRLARLNNGGSYNAWSVEKLAAEFASKPWIQVDMQKEVIITGIQTQGAKHYLKSCYTTEFYVAYSSNQINWQIFKGNSTRNVMYFNGNSDASTIKENQFDPPIVARYIRISPTRAYNRPTLRLELQGCEVNGCSTPLGMENGKIENKQITASSFKKSWWGDYWEPFRARLNAQGRVNAWQAKANNNKQWLEIDLLKIKKITAIITQGCKSLSSEMYVKSYTIHYSEQGVEWKPYRLKSSMVDKIFEGNTNTKGHVKNFFNPPIISRFIRVIPKTWNQSIALRLELFGCDIY

SEQ ID NO: 392 - protein, 1663 aa, Artificial Sequence
  C3
MGPTSGPSLLLLLLTHLPLALGSPMYSIITPNILRLESEETMVLEAHDAQGDVPVTVTVHDFPGKKLVLSSEKTVLTPATNHMGNVTFTIPANREFKSEKGRNKFVTVQATFGTQVVEKVVLVSLQSGYLFIQTDKTIYTPGSTVLYRIFTVNHKLLPVGRTVMVNIENPEGIPVKQDSLSSQNQLGVLPLSWDIPELVNMGQWKIRAYYENSPQQVFSTEFEVKEYVLPSFEVIVEPTEKFYYIYNEKGLEVTITARFLYGKKVEGTAFVIFGIQDGEQRISLPESLKRIPIEDGSGEVVLSRKVLLDGVQNPRAEDLVGKSLYVSATVILHSGSDMVQAERSGIPIVTSPYQIHFTKTPKYFKPGMPFDLMVFVTNPDGSPAYRVPVAVQGEDTVQSLTQGDGVAKLSINTHPSQKPLSITVRTKKQELSEAEQATRTMQALPYSTVGNSNNYLHLSVLRTELRPGETLNVNFLLRMDRAHEAKIRYYTYLIMNKGRLLKAGRQVREPGQDLVVLPLSITTDFIPSFRLVAYYTLIGASGQREVVADSVWVDVKDSCVGSLVVKSGQSEDRQPVPGQQMTLKIEGDHGARVVLVAVDKGVFVLNKKNKLTQSKIWDVVEKADIGCTPGSGKDYAGVFSDAGLTFTSSSGQQTAQRAELQCPQPAARRRRSVQLTEKRMDKVGKYPKELRKCCEDGMRENPMRFSCQRRTRFISLGEACKKVFLDCCNYITELRRQHARASHLGLARSNLDEDIIAEENIVSRSEFPESWLWNVEDLKEPPKNGISTKLMNIFLKDSITTWEILAVSMSDKKGICVADPFEVTVMQDFFIDLRLPYSVVRNEQVEIRAVLYNYRQNQELKVRVELLHNPAFCSLATTKRRHQQTVTIPPKSSLSVPYVIVPLKTGLQEVEVKAAVYHHFISDGVRKSLKVVPEGIRMNKTVAVRTLDPERLGREGVQKEDIPPADLSDQVPDTESETRILLQGTPVAQMTEDAVDAERLKHLIVTPSGCGEQNMIGMTPTVIAVHYLDETEQWEKFGLEKRQGALELIKKGYTQQLAFRQPSSAFAAFVKRAPSTWLTAYVVKVFSLAVNLIAIDSQVLCGAVKWLILEKQKPDGVFQEDAPVIHQEMIGGLRNNNEKDMALTAFVLISLQEAKDICEEQVNSLPGSITKAGDFLEANYMNLQRSYTVAIAGYALAQMGRLKGPLLNKFLTTAKDKNRWEDPGKQLYNVEATSYALLALLQLKDFDFVPPVVRWLNEQRYYGGGYGSTQATFMVFQALAQYQKDAPDHQELNLDVSLQLPSRSSKITHRIHWESASLLRSEETKENEGFTVTAEGKGQGTLSVVTMYHAKAKDQLTCNKFDLKVTIKPAPETEKRPQDAKNTMILEICTRYRGDQDATMSILDISMMTGFAPDTDDLKQLANGVDRYISKYELDKAFSDRNTLIIYLDKVSHSEDDCLAFKVHQYFNVELIQPGAVKVYAYYNLEESCTRFYHPEKEDGKLNKLCRDELCRCAEENCFIQKSDDKVTLEERLDKACEPGVDYVYKTRLVKVQLSNDFDEYIMAIEQTIKSGSDEVQVGQQRTFISPIKCREALKLEEKKHYLMWGLSSDFWGEKPNLSYIIGKDTWVEHWPEEDECQDEENQKQCQDLGAFTESMVVFGCPN

SEQ ID NO: 393 - protein, 1669 aa, Artificial Sequence
  COL4A1
MGPRLSVWLLLLPAALLLHEEHSRAAAKGGCAGSGCGKCDCHGVKGQKGERGLPGLQGVIGFPGMQGPEGPQGPPGQKGDTGEPGLPGTKGTRGPPGASGYPGNPGLPGIPGQDGPPGPPGIPGCNGTKGERGPLGPPGLPGFAGNPGPPGLPGMKGDPGEILGHVPGMLLKGERGFPGIPGTPGPPGLPGLQGPVGPPGFTGPPGPPGPPGPPGEKGQMGLSFQGPKGDKGDQGVSGPPGVPGQAQVQEKGDFATKGEKGQKGEPGFQGMPGVGEKGEPGKPGPRGKPGKDGDKGEKGSPGFPGEPGYPGLIGRQGPQGEKGEAGPPGPPGIVIGTGPLGEKGERGYPGTPGPRGEPGPKGFPGLPGQPGPPGLPVPGQAGAPGFPGERGEKGDRGFPGTSLPGPSGRDGLPGPPGSPGPPGQPGYTNGIVECQPGPPGDQGPPGIPGQPGFIGEIGEKGQKGESCLICDIDGYRGPPGPQGPPGEIGFPGQPGAKGDRGLPGRDGVAGVPGPQGTPGLIGQPGAKGEPGEFYFDLRLKGDKGDPGFPGQPGMPGRAGSPGRDGHPGLPGPKGSPGSVGLKGERGPPGGVGFPGSRGDTGPPGPPGYGPAGPIGDKGQAGFPGGPGSPGLPGPKGEPGKIVPLPGPPGAEGLPGSPGFPGPQGDRGFPGTPGRPGLPGEKGAVGQPGIGFPGPPGPKGVDGLPGDMGPPGTPGRPGFNGLPGNPGVQGQKGEPGVGLPGLKGLPGLPGIPGTPGEKGSIGVPGVPGEHGAIGPPGLQGIRGEPGPPGLPGSVGSPGVPGIGPPGARGPPGGQGPPGLSGPPGIKGEKGFPGFPGLDMPGPKGDKGAQGLPGITGQSGLPGLPGQQGAPGIPGFPGSKGEMGVMGTPGQPGSPGPVGAPGLPGEKGDHGFPGSSGPRGDPGLKGDKGDVGLPGKPGSMDKVDMGSMKGQKGDQGEKGQIGPIGEKGSRGDPGTPGVPGKDGQAGQPGQPGPKGDPGISGTPGAPGLPGPKGSVGGMGLPGTPGEKGVPGIPGPQGSPGLPGDKGAKGEKGQAGPPGIGIPGLRGEKGDQGIAGFPGSPGEKGEKGSIGIPGMPGSPGLKGSPGSVGYPGSPGLPGEKGDKGLPGLDGIPGVKGEAGLPGTPGPTGPAGQKGEPGSDGIPGSAGEKGEPGLPGRGFPGFPGAKGDKGSKGEVGFPGLAGSPGIPGSKGEQGFMGPPGPQGQPGLPGSPGHATEGPKGDRGPQGQPGLPGLPGPMGPPGLPGIDGVKGDKGNPGWPGAPGVPGPKGDPGFQGMPGIGGSPGITGSKGDMGPPGVPGFQGPKGLPGLQGIKGDQGDQGVPGAKGLPGPPGPPGPYDIIKGEPGLPGPEGPPGLKGLQGLPGPKGQQGVTGLVGIPGPPGIPGFDGAPGQKGEMGPAGPTGPRGFPGPPGPDGLPGSMGPPGTPSVDHGFLVTRHSQTIDDPQCPSGTKILYHGYSLLYVQGNERAHGQDLGTAGSCLRKFSTMPFLFCNINNVCNFASRNDYSYWLSTPEPMPMSMAPITGENIRPFISRCAVCEAPAMVMAVHSQTIQIPPCPSGWSSLWIGYSFVMHTSAGAEGSGQALASPGSCLEEFRSAPFIECHGRGTCNYYANAYSFWLATIERSEMFKKPTPSTLKAGELRTHVSRCQVCMRRT

SEQ ID NO: 394 - protein, 1231 aa, Artificial Sequence
  CFH
MRLLAKIICLMLWAICVAEDCNELPPRRNTEILTGSWSDQTYPEGTQAIYKCRPGYRSLGNVIMVCRKGEWVALNPLRKCQKRPCGHPGDTPFGTFTLTGGNVFEYGVKAVYTCNEGYQLLGEINYRECDTDGWTNDIPICEVVKCLPVTAPENGKIVSSAMEPDREYHFGQAVRFVCNSGYKIEGDEEMHCSDDGFWSKEKPKCVEISCKSPDVINGSPISQKIIYKENERFQYKCNMGYEYSERGDAVCTESGWRPLPSCEEKSCDNPYIPNGDYSPLRIKHRTGDEITYQCRNGFYPATRGNTAKCTSTGWIPAPRCTLKPCDYPDIKHGGLYHENMRRPYFPVAVGKYYSYYCDEHFETPSGSYWDHIHCTQDGWSPAVPCLRKCYFPYLENGYNQNYGRKFVQGKSIDVACHPGYALPKAQTTVTCMENGWSPTPRCIRVKTCSKSSIDIENGFISESQYTYALKEKAKYQCKLGYVTADGETSGSITCGKDGWSAQPTCIKSCDIPVFMNARTKNDFTWFKLNDTLDYECHDGYESNTGSTTGSIVCGYNGWSDLPICYERECELPKIDVHLVPDRKKDQYKVGEVLKFSCKPGFTIVGPNSVQCYHFGLSPDLPICKEQVQSCGPPPELLNGNVKEKTKEEYGHSEVVEYYCNPRFLMKGPNKIQCVDGEWTTLPVCIVEESTCGDIPELEHGWAQLSSPPYYYGDSVEFNCSESFTMIGHRSITCIHGVWTQLPQCVAIDKLKKCKSSNLIILEEHLKNKKEFDHNSNIRYRCRGKEGWIHTVCINGRWDPEVNCSMAQIQLCPPPPQIPNSHNMTTTLNYRDGEKVSVLCQENYLIQEGEEITCKDGRWQSIPLCVEKIPCSQPPQIEHGTINSSRSSQESYAHGTKLSYTCEGGFRISEENETTCYMGKWSSPPQCEGLPCKSPPEISHGVVAHMSDSYQYGEEVTYKCFEGFGIDGPAIAKCLGEKWSHPPSCIKTDCLSLPSFENAIPMGEKKDVYKAGEQVTYTCATYYKMDGASNVTCINSRWTGRPTCRDTSCVNPPTVQNAYIVSRQMSKYPSGERVRYQCRSPYEMFGDEEVMCLNGNWTEPPQCKDSTGKCGPPPPIDNGDITSFPLSVYAPASSVEYQCQNLYQLEGNKRITCRNGQWSEPPKCLHPCVISREIMENYNIALRWTAKQKLYSRTGESVEFVCKRGYRLSSRSHTLRTTCWDGKLEYPTCAKR

SEQ ID NO: 395 - protein, 1212 aa, Artificial Sequence
  SLC12A2
MEPRPTAPSSGAPGLAGVGETPSAAALAAARVELPGTAVPSVPEDAAPASRDGGGVRDEGPAAAGDGLGRPLGPTPSQSRFQVDLVSENAGRAAAAAAAAAAAAAAAGAGAGAKQTPADGEASGESEPAKGSEEAKGRFRVNFVDPAASSSAEDSLSDAAGVGVDGPNVSFQNGGDTVLSEGSSLHSGGGGGSGHHQHYYYDTHTNTYYLRTFGHNTMDAVPRIDHYRHTAAQLGEKLLRPSLAELHDELEKEPFEDGFANGEESTPTRDAVVTYTAESKGVVKFGWIKGVLVRCMLNIWGVMLFIRLSWIVGQAGIGLSVLVIMMATVVTTITGLSTSAIATNGFVRGGGAYYLISRSLGPEFGGAIGLIFAFANAVAVAMYVVGFAETVVELLKEHSILMIDEINDIRIIGAITVVILLGISVAGMEWEAKAQIVLLVILLLAIGDFVIGTFIPLESKKPKGFFGYKSEIFNENFGPDFREEETFFSVFAIFFPAATGILAGANISGDLADPQSAIPKGTLLAILITTLVYVGIAVSVGSCVVRDATGNVNDTIVTELTNCTSAACKLNFDFSSCESSPCSYGLMNNFQVMSMVSGFTPLISAGIFSATLSSALASLVSAPKIFQALCKDNIYPAFQMFAKGYGKNNEPLRGYILTFLIALGFILIAELNVIAPIISNFFLASYALINFSVFHASLAKSPGWRPAFKYYNMWISLLGAILCCIVMFVINWWAALLTYVIVLGLYIYVTYKKPDVNWGSSTQALTYLNALQHSIRLSGVEDHVKNFRPQCLVMTGAPNSRPALLHLVHDFTKNVGLMICGHVHMGPRRQAMKEMSIDQAKYQRWLIKNKMKAFYAPVHADDLREGAQYLMQAAGLGRMKPNTLVLGFKKDWLQADMRDVDMYINLFHDAFDIQYGVVVIRLKEGLDISHLQGQEELLSSQEKSPGTKDVVVSVEYSKKSDLDTSKPLSEKPITHKVEEEDGKTATQPLLKKESKGPIVPLNVADQKLLEASTQFQKKQGKNTIDVWWLFDDGGLTLLIPYLLTTKKKWKDCKIRVFIGGKINRIDHDRRAMATLLSKFRIDFSDIMVLGDINTKPKKENIIAFEEIIEPYRLHEDDKEQDIADKMKEDEPWRITDNELELYKTKTYRQIRLNELLKEHSSTANIIVMSLPVARKGAVSSALYMAWLEALSKDLPPILLVRGNHQSVLTFYS

SEQ ID NO: 396 - protein, 559 aa, Artificial Sequence
  GK
MAASKKAVLGPLVGAVDQGTSSTRFLVFNSKTAELLSHHQVEIKQEFPREGWVEQDPKEILHSVYECIEKTCEKLGQLNIDISNIKAIGVSNQRETTVVWDKITGEPLYNAVVWLDLRTQSTVESLSKRIPGNNNFVKSKTGLPLSTYFSAVKLRWLLDNVRKVQKAVEEKRALFGTIDSWLIWSLTGGVNGGVHCTDVTNASRTMLFNIHSLEWDKQLCEFFGIPMEILPNVRSSSEIYGLMKISHSVKAGALEGVPISGCLGDQSAALVGQMCFQIGQAKNTYGTGCFLLCNTGHKCVFSDHGLLTTVAYKLGRDKPVYYALEGSVAIAGAVIRWLRDNLGIIKTSEEIEKLAKEVGTSYGCYFVPAFSGLYAPYWEPSARGIICGLTQFTNKCHIAFAALEAVCFQTREILDAMNRDCGIPLSHLQVDGGMTSNKILMQLQADILYIPVVKPSMPETTALGAAMAAGAAEGVGVWSLEPEDLSAVTMERFEPQINAEESEIRYSTWKKAVMKSMGWVTTQSPESGDPSIFCSLPLGFFIVSSMVMLIGARYISGIP

SEQ ID NO: 397 - protein, 197 aa, Artificial Sequence
  SFTPC
MDVGSKEVLMESPPDYSAAPRGRFGIPCCPVHLKRLLIVVVVVVLIVVVIVGALLMGLHMSQKHTEMVLEMSIGAPEAQQRLALSEHLVTTATFSIGSTGLVVYDYQQLLIAYKPAPGTCCYIMKIAPESIPSLEALNRKVHNFQMECSLQAKPAVPTSKLGQAEGRDAGSAPSGGDPAFLGMAVNTLCGEVPLYYI

SEQ ID NO: 398 - protein, 401 aa, Artificial Sequence
  CRTAP
MEPGRRGAAALLALLCVACALRAGRAQYERYSFRSFPRDELMPLESAYRHALDKYSGEHWAESVGYLEISLRLHRLLRDSEAFCHRNCSAAPQPEPAAGLASYPELRLFGGLLRRAHCLKRCKQGLPAFRQSQPSREVLADFQRREPYKFLQFAYFKANNLPKAIAAAHTFLLKHPDDEMMKRNMAYYKSLPGAEDYIKDLETKSYESLFIRAVRAYNGENWRTSITDMELALPDFFKAFYECLAACEGSREIKDFKDFYLSIADHYVEVLECKIQCEENLTPVIGGYPVEKFVATMYHYLQFAYYKLNDLKNAAPCAVSYLLFDQNDKVMQQNLVYYQYHRDTWGLSDEHFQPRPEAVQFFNVTTLQKELYDFAKENIMDDDEGEVVEYVDDLLELEETS

SEQ ID NO: 399 - protein, 736 aa, Artificial Sequence
  P3H1
MAVRALKLLTTLLAVVAAASQAEVESEAGWGMVTPDLLFAEGTAAYARGDWPGVVLSMERALRSRAALRALRLRCRTQCAADFPWELDPDWSPSPAQASGAAALRDLSFFGGLLRRAACLRRCLGPPAAHSLSEEMELEFRKRSPYNYLQVAYFKINKLEKAVAAAHTFFVGNPEHMEMQQNLDYYQTMSGVKEADFKDLETQPHMQEFRLGVRLYSEEQPQEAVPHLEAALQEYFVAYEECRALCEGPYDYDGYNYLEYNADLFQAITDHYIQVLNCKQNCVTELASHPSREKPFEDFLPSHYNYLQFAYYNIGNYTQAVECAKTYLLFFPNDEVMNQNLAYYAAMLGEEHTRSIGPRESAKEYRQRSLLEKELLFFAYDVFGIPFVDPDSWTPEEVIPKRLQEKQKSERETAVRISQEIGNLMKEIETLVEEKTKESLDVSRLTREGGPLLYEGISLTMNSKLLNGSQRVVMDGVISDHECQELQRLTNVAATSGDGYRGQTSPHTPNEKFYGVTVFKALKLGQEGKVPLQSAHLYYNVTEKVRRIMESYFRLDTPLYFSYSHLVCRTAIEEVQAERKDDSHPVHVDNCILNAETLVCVKEPPAYTFRDYSAILYLNGDFDGGNFYFTELDAKTVTAEVQPQCGRAVGFSSGTENPHGVKAVTRGQRCAIALWFTLDPRHSERDRVQADDLVKMLFSPEEMDLSQEQPLDAQQGPPEPAQESLSGSESKPKDEL

SEQ ID NO: 400 - protein, 2944 aa, Artificial Sequence
  COL7A1
MTLRLLVAALCAGILAEAPRVRAQHRERVTCTRLYAADIVFLLDGSSSIGRSNFREVRSFLEGLVLPFSGAASAQGVRFATVQYSDDPRTEFGLDALGSGGDVIRAIRELSYKGGNTRTGAAILHVADHVFLPQLARPGVPKVCILITDGKSQDLVDTAAQRLKGQGVKLFAVGIKNADPEELKRVASQPTSDFFFFVNDFSILRTLLPLVSRRVCTTAGGVPVTRPPDDSTSAPRDLVLSEPSSQSLRVQWTAASGPVTGYKVQYTPLTGLGQPLPSERQEVNVPAGETSVRLRGLRPLTEYQVTVIALYANSIGEAVSGTARTTALEGPELTIQNTTAHSLLVAWRSVPGATGYRVTWRVLSGGPTQQQELGPGQGSVLLRDLEPGTDYEVTVSTLFGRSVGPATSLMARTDASVEQTLRPVILGPTSILLSWNLVPEARGYRLEWRRETGLEPPQKVVLPSDVTRYQLDGLQPGTEYRLTLYTLLEGHEVATPATVVPTGPELPVSPVTDLQATELPGQRVRVSWSPVPGATQYRIIVRSTQGVERTLVLPGSQTAFDLDDVQAGLSYTVRVSARVGPREGSASVLTVRREPETPLAVPGLRVVVSDATRVRVAWGPVPGASGFRISWSTGSGPESSQTLPPDSTATDITGLQPGTTYQVAVSVLRGREEGPAAVIVARTDPLGPVRTVHVTQASSSSVTITWTRVPGATGYRVSWHSAHGPEKSQLVSGEATVAELDGLEPDTEYTVHVRAHVAGVDGPPASVVVRTAPEPVGRVSRLQILNASSDVLRITWVGVTGATAYRLAWGRSEGGPMRHQILPGNTDSAEIRGLEGGVSYSVRVTALVGDREGTPVSIVVTTPPEAPPALGTLHVVQRGEHSLRLRWEPVPRAQGFLLHWQPEGGQEQSRVLGPELSSYHLDGLEPATQYRVRLSVLGPAGEGPSAEVTARTESPRVPSIELRVVDTSIDSVTLAWTPVSRASSYILSWRPLRGPGQEVPGSPQTLPGISSSQRVTGLEPGVSYIFSLTPVLDGVRGPEASVTQTPVCPRGLADVVFLPHATQDNAHRAEATRRVLERLVLALGPLGPQAVQVGLLSYSHRPSPLFPLNGSHDLGIILQRIRDMPYMDPSGNNLGTAVVTAHRYMLAPDAPGRRQHVPGVMVLLVDEPLRGDIFSPIREAQASGLNVVMLGMAGADPEQLRRLAPGMDSVQTFFAVDDGPSLDQAVSGLATALCQASFTTQPRPEPCPVYCPKGQKGEPGEMGLRGQVGPPGDPGLPGRTGAPGPQGPPGSATAKGERGFPGADGRPGSPGRAGNPGTPGAPGLKGSPGLPGPRGDPGERGPRGPKGEPGAPGQVIGGEGPGLPGRKGDPGPSGPPGPRGPLGDPGPRGPPGLPGTAMKGDKGDRGERGPPGPGEGGIAPGEPGLPGLPGSPGPQGPVGPPGKKGEKGDSEDGAPGLPGQPGSPGEQGPRGPPGAIGPKGDRGFPGPLGEAGEKGERGPPGPAGSRGLPGVAGRPGAKGPEGPPGPTGRQGEKGEPGRPGDPAVVGPAVAGPKGEKGDVGPAGPRGATGVQGERGPPGLVLPGDPGPKGDPGDRGPIGLTGRAGPPGDSGPPGEKGDPGRPGPPGPVGPRGRDGEVGEKGDEGPPGDPGLPGKAGERGLRGAPGVRGPVGEKGDQGDPGEDGRNGSPGSSGPKGDRGEPGPPGPPGRLVDTGPGAREKGEPGDRGQEGPRGPKGDPGLPGAPGERGIEGFRGPPGPQGDPGVRGPAGEKGDRGPPGLDGRSGLDGKPGAAGPSGPNGAAGKAGDPGRDGLPGLRGEQGLPGPSGPPGLPGKPGEDGKPGLNGKNGEPGDPGEDGRKGEKGDSGASGREGRDGPKGERGAPGILGPQGPPGLPGPVGPPGQGFPGVPGGTGPKGDRGETGSKGEQGLPGERGLRGEPGSVPNVDRLLETAGIKASALREIVETWDESSGSFLPVPERRRGPKGDSGEQGPPGKEGPIGFPGERGLKGDRGDPGPQGPPGLALGERGPPGPSGLAGEPGKPGIPGLPGRAGGVGEAGRPGERGERGEKGERGEQGRDGPPGLPGTPGPPGPPGPKVSVDEPGPGLSGEQGPPGLKGAKGEPGSNGDQGPKGDRGVPGIKGDRGEPGPRGQDGNPGLPGERGMAGPEGKPGLQGPRGPPGPVGGHGDPGPPGAPGLAGPAGPQGPSGLKGEPGETGPPGRGLTGPTGAVGLPGPPGPSGLVGPQGSPGLPGQVGETGKPGAPGRDGASGKDGDRGSPGVPGSPGLPGPVGPKGEPGPTGAPGQAVVGLPGAKGEKGAPGGLAGDLVGEPGAKGDRGLPGPRGEKGEAGRAGEPGDPGEDGQKGAPGPKGFKGDPGVGVPGSPGPPGPPGVKGDLGLPGLPGAPGVVGFPGQTGPRGEMGQPGPSGERGLAGPPGREGIPGPLGPPGPPGSVGPPGASGLKGDKGDPGVGLPGPRGERGEPGIRGEDGRPGQEGPRGLTGPPGSRGERGEKGDVGSAGLKGDKGDSAVILGPPGPRGAKGDMGERGPRGLDGDKGPRGDNGDPGDKGSKGEPGDKGSAGLPGLRGLLGPQGQPGAAGIPGDPGSPGKDGVPGIRGEKGDVGFMGPRGLKGERGVKGACGLDGEKGDKGEAGPPGRPGLAGHKGEMGEPGVPGQSGAPGKEGLIGPKGDRGFDGQPGPKGDQGEKGERGTPGIGGFPGPSGNDGSAGPPGPPGSVGPRGPEGLQGQKGERGPPGERVVGAPGVPGAPGERGEQGRPGPAGPRGEKGEAALTEDDIRGFVRQEMSQHCACQGQFIASGSRPLPSYAADTAGSQLHAVPVLRVSHAEEEERVPPEDDEYSEYSEYSVEEYQDPEAPWDSDDPCSLPLDEGSCTAYTLRWYHRAVTGSTEACHPFVYGGCGGNANRFGTREACERRCPPRVVQSQGTGTAQD

SEQ ID NO: 401 - protein, 574 aa, Artificial Sequence
  PKLR
MSIQENISSLQLRSWVSKSQRDLAKSILIGAPGGPAGYLRRASVAQLTQELGTAFFQQQQLPAAMADTFLEHLCLLDIDSEPVAARSTSIIATIGPASRSVERLKEMIKAGMNIARLNFSHGSHEYHAESIANVREAVESFAGSPLSYRPVAIALDTKGPEIRTGILQGGPESEVELVKGSQVLVTVDPAFRTRGNANTVWVDYPNIVRVVPVGGRIYIDDGLISLVVQKIGPEGLVTQVENGGVLGSRKGVNLPGAQVDLPGLSEQDVRDLRFGVEHGVDIVFASFVRKASDVAAVRAALGPEGHGIKIISKIENHEGVKRFDEILEVSDGIMVARGDLGIEIPAEKVFLAQKMMIGRCNLAGKPVVCATQMLESMITKPRPTRAETSDVANAVLDGADCIMLSGETAKGNFPVEAVKMQHAIAREAEAAVYHRQLFEELRRAAPLSRDPTEVTAIGAVEAAFKCCAAAIIVLTTTGRSAQLLSRYRPRAAVIAVTRSAQAARQVHLCRGVFPLLYREPPEAIWADDVDRRVQFGIESGKLRGFLRVGDLVIVVTGWRPGSGYTNIMRVLSIS

SEQ ID NO: 402 - protein, 337 aa, Artificial Sequence
  TALDO1
MSSSPVKRQRMESALDQLKQFTTVVADTGDFHAIDEYKPQDATTNPSLILAAAQMPAYQELVEEAIAYGRKLGGSQEDQIKNAIDKLFVLFGAEILKKIPGRVSTEVDARLSFDKDAMVARARRLIELYKEAGISKDRILIKLSSTWEGIQAGKELEEQHGIHCNMTLLFSFAQAVACAEAGVTLISPFVGRILDWHVANTDKKSYEPLEDPGVKSVTKIYNYYKKFSYKTIVMGASFRNTGEIKALAGCDFLTISPKLLGELLQDNAKLVPVLSAKAAQASDLEKIHLDEKSFRWLHNEDQMAVEKLSDGIRKFAADAVKLERMLTERMFNAENGK

SEQ ID NO: 403 - protein, 698 aa, Artificial Sequence
  TF
MRLAVGALLVCAVLGLCLAVPDKTVRWCAVSEHEATKCQSFRDHMKSVIPSDGPSVACVKKASYLDCIRAIAANEADAVTLDAGLVYDAYLAPNNLKPVVAEFYGSKEDPQTFYYAVAVVKKDSGFQMNQLRGKKSCHTGLGRSAGWNIPIGLLYCDLPEPRKPLEKAVANFFSGSCAPCADGTDFPQLCQLCPGCGCSTLNQYFGYSGAFKCLKDGAGDVAFVKHSTIFENLANKADRDQYELLCLDNTRKPVDEYKDCHLAQVPSHTVVARSMGGKEDLIWELLNQAQEHFGKDKSKEFQLFSSPHGKDLLFKDSAHGFLKVPPRMDAKMYLGYEYVTAIRNLREGTCPEAPTDECKPVKWCALSHHERLKCDEWSVNSVGKIECVSAETTEDCIAKIMNGEADAMSLDGGFVYIAGKCGLVPVLAENYNKSDNCEDTPEAGYFAIAVVKKSASDLTWDNLKGKKSCHTAVGRTAGWNIPMGLLYNKINHCRFDEFFSEGCAPGSKKDSSLCKLCMGSGLNLCEPNNKEGYYGYTGAFRCLVEKGDVAFVKHQTVPQNTGGKNPDPWAKNLNEKDYELLCLDGTRKPVEEYANCHLARAPNHAVVTRKDKEACVHKILRQQQHLFGSNVTDCSGNFCLFRSETKDLLFRDDTVCLAKLHDRNTYEKYLGEEYVKAVGNLRKCSTSSLLEACTFRRP

SEQ ID NO: 404 - protein, 314 aa, Artificial Sequence
  EPCAM
MAPPQVLAFGLLLAAATATFAAAQEECVCENYKLAVNCFVNNNRQCQCTSVGAQNTVICSKLAAKCLVMKAEMNGSKLGRRAKPEGALQNNDGLYDPDCDESGLFKAKQCNGTSMCWCVNTAGVRRTDKDTEITCSERVRTYWIIIELKHKAREKPYDSKSLRTALQKEITTRYQLDPKFITSILYENNVITIDLVQNSSQKTQNDVDIADVAYYFEKDVKGESLFHSKKMDLTVNGEQLDLDPGQTLIYYVDEKAPEFSMQGLKAGVIAVIVVVVIAVVAGIVVLVISRKKRMAKYEKAEIKEMGEMHRELNA

SEQ ID NO: 405 - protein, 213 aa, Artificial Sequence
  VHL
MPRRAENWDEAEVGAEEAGVEEYGPEEDGGEESGAEESGPEESGPEELGAEEEMEAGRPRPVLRSVNSREPSQVIFCNRSPRVVLPVWLNFDGEPQPYPTLPPGTGRRIHSYRGHLWLFRDAGTHDGLLVNQTELFVPSLNVDGQPIFANITLPVYTLKERCLQVVRSLVKPENYRRLDIVRSLYEDLEDHPNVQKDLERLTQERIAHQRMGD

SEQ ID NO: 406 - protein, 474 aa, Artificial Sequence
  GC
MKRVLVLLLAVAFGHALERGRDYEKNKVCKEFSHLGKEDFTSLSLVLYSRKFPSGTFEQVSQLVKEVVSLTEACCAEGADPDCYDTRTSALSAKSCESNSPFPVHPGTAECCTKEGLERKLCMAALKHQPQEFPTYVEPTNDEICEAFRKDPKEYANQFMWEYSTNYGQAPLSLLVSYTKSYLSMVGSCCTSASPTVCFLKERLQLKHLSLLTTLSNRVCSQYAAYGEKKSRLSNLIKLAQKVPTADLEDVLPLAEDITNILSKCCESASEDCMAKELPEHTVKLCDNLSTKNSKFEDCCQEKTAMDVFVCTYFMPAAQLPELPDVELPTNKDVCDPGNTKVMDKYTFELSRRTHLPEVFLSKVLEPTLKSLGECCDVEDSTTCFNAKGPLLKKELSSFIDKGQELCADYSENTFTEYKKKLAERLKAKLPDATPTELAKLVNKHSDFASNCCSINSPPLYCDSEIDAELKNIL

SEQ ID NO: 407 - protein, 418 aa, Artificial Sequence
  SERPINA1
MPSSVSWGILLLAGLCCLVPVSLAEDPQGDAAQKTDTSHHDQDHPTFNKITPNLAEFAFSLYRQLAHQSNSTNIFFSPVSIATAFAMLSLGTKADTHDEILEGLNFNLTEIPEAQIHEGFQELLRTLNQPDSQLQLTTGNGLFLSEGLKLVDKFLEDVKKLYHSEAFTVNFGDTEEAKKQINDYVEKGTQGKIVDLVKELDRDTVFALVNYIFFKGKWERPFEVKDTEEEDFHVDQVTTVKVPMMKRLGMFNIQHCKKLSSWVLLMKYLGNATAIFFLPDEGKLQHLENELTHDIITKFLENEDRRSASLHLPKLSITGTYDLKSVLGQLGITKVFSNGADLSGVTEEAPLKLSKAVHKAVLTIDEKGTEAAGAMFLEAIPMSIPPEVKFNKPFVFLMIEQNTKSPLFMGKVVNPTQK

SEQ ID NO: 408 - protein, 1503 aa, Artificial Sequence
  ABCC6
MAAPAEPCAGQGVWNQTEPEPAATSLLSLCFLRTAGVWVPPMYLWVLGPIYLLFIHHHGRGYLRMSPLFKAKMVLGFALIVLCTSSVAVALWKIQQGTPEAPEFLIHPTVWLTTMSFAVFLIHTERKKGVQSSGVLFGYWLLCFVLPATNAAQQASGAGFQSDPVRHLSTYLCLSLVVAQFVLSCLADQPPFFPEDPQQSNPCPETGAAFPSKATFWWVSGLVWRGYRRPLRPKDLWSLGRENSSEELVSRLEKEWMRNRSAARRHNKAIAFKRKGGSGMKAPETEPFLRQEGSQWRPLLKAIWQVFHSTFLLGTLSLIISDVFRFTVPKLLSLFLEFIGDPKPPAWKGYLLAVLMFLSACLQTLFEQQNMYRLKVLQMRLRSAITGLVYRKVLALSSGSRKASAVGDVVNLVSVDVQRLTESVLYLNGLWLPLVWIVVCFVYLWQLLGPSALTAIAVFLSLLPLNFFISKKRNHHQEEQMRQKDSRARLTSSILRNSKTIKFHGWEGAFLDRVLGIRGQELGALRTSGLLFSVSLVSFQVSTFLVALVVFAVHTLVAENAMNAEKAFVTLTVLNILNKAQAFLPFSIHSLVQARVSFDRLVTFLCLEEVDPGVVDSSSSGSAAGKDCITIHSATFAWSQESPPCLHRINLTVPQGCLLAVVGPVGAGKSSLLSALLGELSKVEGFVSIEGAVAYVPQEAWVQNTSVVENVCFGQELDPPWLERVLEACALQPDVDSFPEGIHTSIGEQGMNLSGGQKQRLSLARAVYRKAAVYLLDDPLAALDAHVGQHVFNQVIGPGGLLQGTTRILVTHALHILPQADWIIVLANGAIAEMGSYQELLQRKGALMCLLDQARQPGDRGEGETEPGTSTKDPRGTSAGRRPELRRERSIKSVPEKDRTTSEAQTEVPLDDPDRAGWPAGKDSIQYGRVKATVHLAYLRAVGTPLCLYALFLFLCQQVASFCRGYWLSLWADDPAVGGQQTQAALRGGIFGLLGCLQAIGLFASMAAVLLGGARASRLLFQRLLWDVVRSPISFFERTPIGHLLNRFSKETDTVDVDIPDKLRSLLMYAFGLLEVSLVVAVATPLATVAILPLFLLYAGFQSLYVVSSCQLRRLESASYSSVCSHMAETFQGSTVVRAFRTQAPFVAQNNARVDESQRISFPRLVADRWLAANVELLGNGLVFAAATCAVLSKAHLSAGLVGFSVSAALQVTQTLQWVVRNWTDLENSIVSVERMQDYAWTPKEAPWRLPTCAAQPPWPQGGQIEFRDFGLRYRPELPLAVQGVSFKIHAGEKVGIVGRTGAGKSSLASGLLRLQEAAEGGIWIDGVPIAHVGLHTLRSRISIIPQDPILFPGSLRMNLDLLQEHSDEAIWAALETVQLKALVASLPGQLQYKCADRGEDLSVGQKQLLCLARALLRKTQILILDEATAAVDPGTELQMQAMLGSWFAQCTVLLIAHRLRSVMDCARVLVMDKGQVAESGSPAQLLAQKGLFYRLAQESGLV

SEQ ID NO: 409 - protein, 2351 aa, Artificial Sequence
  F8
MQIELSTCFFLCLLRFCFSATRRYYLGAVELSWDYMQSDLGELPVDARFPPRVPKSFPFNTSVVYKKTLFVEFTDHLFNIAKPRPPWMGLLGPTIQAEVYDTVVITLKNMASHPVSLHAVGVSYWKASEGAEYDDQTSQREKEDDKVFPGGSHTYVWQVLKENGPMASDPLCLTYSYLSHVDLVKDLNSGLIGALLVCREGSLAKEKTQTLHKFILLFAVFDEGKSWHSETKNSLMQDRDAASARAWPKMHTVNGYVNRSLPGLIGCHRKSVYWHVIGMGTTPEVHSIFLEGHTFLVRNHRQASLEISPITFLTAQTLLMDLGQFLLFCHISSHQHDGMEAYVKVDSCPEEPQLRMKNNEEAEDYDDDLTDSEMDVVRFDDDNSPSFIQIRSVAKKHPKTWVHYIAAEEEDWDYAPLVLAPDDRSYKSQYLNNGPQRIGRKYKKVRFMAYTDETFKTREAIQHESGILGPLLYGEVGDTLLIIFKNQASRPYNIYPHGITDVRPLYSRRLPKGVKHLKDFPILPGEIFKYKWTVTVEDGPTKSDPRCLTRYYSSFVNMERDLASGLIGPLLICYKESVDQRGNQIMSDKRNVILFSVFDENRSWYLTENIQRFLPNPAGVQLEDPEFQASNIMHSINGYVFDSLQLSVCLHEVAYWYILSIGAQTDFLSVFFSGYTFKHKMVYEDTLTLFPFSGETVFMSMENPGLWILGCHNSDFRNRGMTALLKVSSCDKNTGDYYEDSYEDISAYLLSKNNAIEPRSFSQNSRHPSTRQKQFNATTIPENDIEKTDPWFAHRTPMPKIQNVSSSDLLMLLRQSPTPHGLSLSDLQEAKYETFSDDPSPGAIDSNNSLSEMTHFRPQLHHSGDMVFTPESGLQLRLNEKLGTTAATELKKLDFKVSSTSNNLISTIPSDNLAAGTDNTSSLGPPSMPVHYDSQLDTTLFGKKSSPLTESGGPLSLSEENNDSKLLESGLMNSQESSWGKNVSSTESGRLFKGKRAHGPALLTKDNALFKVSISLLKTNKTSNNSATNRKTHIDGPSLLIENSPSVWQNILESDTEFKKVTPLIHDRMLMDKNATALRLNHMSNKTTSSKNMEMVQQKKEGPIPPDAQNPDMSFFKMLFLPESARWIQRTHGKNSLNSGQGPSPKQLVSLGPEKSVEGQNFLSEKNKVVVGKGEFTKDVGLKEMVFPSSRNLFLTNLDNLHENNTHNQEKKIQEEIEKKETLIQENVVLPQIHTVTGTKNFMKNLFLLSTRQNVEGSYDGAYAPVLQDFRSLNDSTNRTKKHTAHFSKKGEEENLEGLGNQTKQIVEKYACTTRISPNTSQQNFVTQRSKRALKQFRLPLEETELEKRIIVDDTSTQWSKNMKHLTPSTLTQIDYNEKEKGAITQSPLSDCLTRSHSIPQANRSPLPIAKVSSFPSIRPIYLTRVLFQDNSSHLPAASYRKKDSGVQESSHFLQGAKKNNLSLAILTLEMTGDQREVGSLGTSATNSVTYKKVENTVLPKPDLPKTSGKVELLPKVHIYQKDLFPTETSNGSPGHLDLVEGSLLQGTEGAIKWNEANRPGKVPFLRVATESSAKTPSKLLDPLAWDNHYGTQIPKEEWKSQEKSPEKTAFKKKDTILSLNACESNHAIAAINEGQNKPEIEVTWAKQGRTERLCSQNPPVLKRHQREITRTTLQSDQEEIDYDDTISVEMKKEDFDIYDEDENQSPRSFQKKTRHYFIAAVERLWDYGMSSSPHVLRNRAQSGSVPQFKKVVFQEFTDGSFTQPLYRGELNEHLGLLGPYIRAEVEDNIMVTFRNQASRPYSFYSSLISYEEDQRQGAEPRKNFVKPNETKTYFWKVQHHMAPTKDEFDCKAWAYFSDVDLEKDVHSGLIGPLLVCHTNTLNPAHGRQVTVQEFALFFTIFDETKSWYFTENMERNCRAPCNIQMEDPTFKENYRFHAINGYIMDTLPGLVMAQDQRIRWYLLSMGSNENIHSIHFSGHVFTVRKKEEYKMALYNLYPGVFETVEMLPSKAGIWRVECLIGEHLHAGMSTLFLVYSNKCQTPLGMASGHIRDFQITASGQYGQWAPKLARLHYSGSINAWSTKEPFSWIKVDLLAPMIIHGIKTQGARQKFSSLYISQFIIMYSLDGKKWQTYRGNSTGTLMVFFGNVDSSGIKHNIFNPPIIARYIRLHPTHYSIRSTLRMELMGCDLNSCSMPLGMESKAISDAQITASSYFTNMFATWSPSKARLHLQGRSNAWRPQVNNPKEWLQVDFQKTMKVTGVTTQGVKSLLTSMYVKEFLISSSQDGHQWTLFFQNGKVKVFQGNQDSFTPVVNSLDPPLLTRYLRIHPQSWVHQIALRMEVLGCEAQDLY

SEQ ID NO: 410 - protein, 461 aa, Artificial Sequence
  F9
MQRVNMIMAESPGLITICLLGYLLSAECTVFLDHENANKILNRPKRYNSGKLEEFVQGNLERECMEEKCSFEEAREVFENTERTTEFWKQYVDGDQCESNPCLNGGSCKDDINSYECWCPFGFEGKNCELDVTCNIKNGRCEQFCKNSADNKVVCSCTEGYRLAENQKSCEPAVPFPCGRVSVSQTSKLTRAETVFPDVDYVNSTEAETILDNITQSTQSFNDFTRVVGGEDAKPGQFPWQVVLNGKVDAFCGGSIVNEKWIVTAAHCVETGVKITVVAGEHNIEETEHTEQKRNVIRIIPHHNYNAAINKYNHDIALLELDEPLVLNSYVTPICIADKEYTNIFLKFGSGYVSGWGRVFHKGRSALVLQYLRVPLVDRATCLRSTKFTIYNNMFCAGFHEGGRDSCQGDSGGPHVTEVEGTSFLTGIISWGEECAMKGKYGIYTKVSRYVNWIKEKTKLT

SEQ ID NO: 411 - protein, 4562 aa, Artificial Sequence
  ApoB
MDPPRPALLALLALPALLLLLLAGARAEEEMLENVSLVCPKDATRFKHLRKYTYNYEAESSSGVPGTADSRSATRINCKVELEVPQLCSFILKTSQCTLKEVYGFNPEGKALLKKTKNSEEFAAAMSRYELKLAIPEGKQVFLYPEKDEPTYILNIKRGIISALLVPPETEEAKQVLFLDTVYGNCSTHFTVKTRKGNVATEISTERDLGQCDRFKPIRTGISPLALIKGMTRPLSTLISSSQSCQYTLDAKRKHVAEAICKEQHLFLPFSYKNKYGMVAQVTQTLKLEDTPKINSRFFGEGTKKMGLAFESTKSTSPPKQAEAVLKTLQELKKLTISEQNIQRANLFNKLVTELRGLSDEAVTSLLPQLIEVSSPITLQALVQCGQPQCSTHILQWLKRVHANPLLIDVVTYLVALIPEPSAQQLREIFNMARDQRSRATLYALSHAVNNYHKTNPTGTQELLDIANYLMEQIQDDCTGDEDYTYLILRVIGNMGQTMEQLTPELKSSILKCVQSTKPSLMIQKAAIQALRKMEPKDKDQEVLLQTFLDDASPGDKRLAAYLMLMRSPSQAINKIVQILPWEQNEQVKNFVASHIANILNSEELDIQDLKKLVKEALKESQLPTVMDFRKFSRNYQLYKSVSLPSLDPASAKIEGNLIFDPNNYLPKESMLKTTLTAFGFASADLIEIGLEGKGFEPTLEALFGKQGFFPDSVNKALYWVNGQVPDGVSKVLVDHFGYTKDDKHEQDMVNGIMLSVEKLIKDLKSKEVPEARAYLRILGEELGFASLHDLQLLGKLLLMGARTLQGIPQMIGEVIRKGSKNDFFLHYIFMENAFELPTGAGLQLQISSSGVIAPGAKAGVKLEVANMQAELVAKPSVSVEFVTNMGIIIPDFARSGVQMNTNFFHESGLEAHVALKAGKLKFIIPSPKRPVKLLSGGNTLHLVSTTKTEVIPPLIENRQSWSVCKQVFPGLNYCTSGAYSNASSTDSASYYPLTGDTRLELELRPTGEIEQYSVSATYELQREDRALVDTLKFVTQAEGAKQTEATMTFKYNRQSMTLSSEVQIPDFDVDLGTILRVNDESTEGKTSYRLTLDIQNKKITEVALMGHLSCDTKEERKIKGVISIPRLQAEARSEILAHWSPAKLLLQMDSSATAYGSTVSKRVAWHYDEEKIEFEWNTGTNVDTKKMTSNFPVDLSDYPKSLHMYANRLLDHRVPQTDMTFRHVGSKLIVAMSSWLQKASGSLPYTQTLQDHLNSLKEFNLQNMGLPDFHIPENLFLKSDGRVKYTLNKNSLKIEIPLPFGGKSSRDLKMLETVRTPALHFKSVGFHLPSREFQVPTFTIPKLYQLQVPLLGVLDLSTNVYSNLYNWSASYSGGNTSTDHFSLRARYHMKADSVVDLLSYNVQGSGETTYDHKNTFTLSYDGSLRHKFLDSNIKFSHVEKLGNNPVSKGLLIFDASSSWGPQMSASVHLDSKKKQHLFVKEVKIDGQFRVSSFYAKGTYGLSCQRDPNTGRLNGESNLRFNSSYLQGTNQITGRYEDGTLSLTSTSDLQSGIIKNTASLKYENYELTLKSDTNGKYKNFATSNKMDMTFSKQNALLRSEYQADYESLRFFSLLSGSLNSHGLELNADILGTDKINSGAHKATLRIGQDGISTSATTNLKCSLLVLENELNAELGLSGASMKLTTNGRFREHNAKFSLDGKAALTELSLGSAYQAMILGVDSKNIFNFKVSQEGLKLSNDMMGSYAEMKFDHTNSLNIAGLSLDFSSKLDNIYSSDKFYKQTVNLQLQPYSLVTTLNSDLKYNALDLTNNGKLRLEPLKLHVAGNLKGAYQNNEIKHIYAISSAALSASYKADTVAKVQGVEFSHRLNTDIAGLASAIDMSTNYNSDSLHFSNVFRSVMAPFTMTIDAHTNGNGKLALWGEHTGQLYSKFLLKAEPLAFTFSHDYKGSTSHHLVSRKSISAALEHKVSALLTPAEQTGTWKLKTQFNNNEYSQDLDAYNTKDKIGVELTGRTLADLTLLDSPIKVPLLLSEPINIIDALEMRDAVEKPQEFTIVAFVKYDKNQDVHSINLPFFETLQEYFERNRQTIIVVLENVQRNLKHINIDQFVRKYRAALGKLPQQANDYLNSFNWERQVSHAKEKLTALTKKYRITENDIQIALDDAKINFNEKLSQLQTYMIQFDQYIKDSYDLHDLKIAIANIIDEIIEKLKSLDEHYHIRVNLVKTIHDLHLFIENIDFNKSGSSTASWIQNVDTKYQIRIQIQEKLQQLKRHIQNIDIQHLAGKLKQHIEAIDVRVLLDQLGTTISFERINDILEHVKHFVINLIGDFEVAEKINAFRAKVHELIERYEVDQQIQVLMDKLVELAHQYKLKETIQKLSNVLQQVKIKDYFEKLVGFIDDAVKKLNELSFKTFIEDVNKFLDMLIKKLKSFDYHQFVDETNDKIREVTQRLNGEIQALELPQKAEALKLFLEETKATVAVYLESLQDTKITLIINWLQEALSSASLAHMKAKFRETLEDTRDRMYQMDIQQELQRYLSLVGQVYSTLVTYISDWWTLAAKNLTDFAEQYSIQDWAKRMKALVEQGFTVPEIKTILGTMPAFEVSLQALQKATFQTPDFIVPLTDLRIPSVQINFKDLKNIKIPSRFSTPEFTILNTFHIPSFTIDFVEMKVKIIRTIDQMLNSELQWPVPDIYLRDLKVEDIPLARITLPDFRLPEIAIPEFIIPTLNLNDFQVPDLHIPEFQLPHISHTIEVPTFGKLYSILKIQSPLFTLDANADIGNGTTSANEAGIAASITAKGESKLEVLNFDFQANAQLSNPKINPLALKESVKFSSKYLRTEHGSEMLFFGNAIEGKSNTVASLHTEKNTLELSNGVIVKINNQLTLDSNTKYFHKLNIPKLDFSSQADLRNEIKTLLKAGHIAWTSSGKGSWKWACPRFSDEGTHESQISFTIEGPLTSFGLSNKINSKHLRVNQNLVYESGSLNFSKLEIQSQVDSQHVGHSVLTAKGMALFGEGKAEFTGRHDAHLNGKVIGTLKNSLFFSAQPFEITASTNNEGNLKVRFPLRLTGKIDFLNNYALFLSPSAQQASWQVSARFNQYKYNQNFSAGNNENIMEAHVGINGEANLDFLNIPLTIPEMRLPYTIITTPPLKDFSLWEKTGLKEFLKTTKQSFDLSVKAQYKKNKHRHSITNPLAVLCEFISQSIKSFDRHFEKNRNNALDFVTKSYNETKIKFDKYKAEKSHDELPRTFQIPGYTVPVVNVEVSPFTIEMSAFGYVFPKAVSMPSFSILGSDVRVPSYTLILPSLELPVLHVPRNLKLSLPDFKELCTISHIFIPAMGNITYDFSFKSSVITLNTNAELFNQSDIVAHLLSSSSSVIDALQYKLEGTTRLTRKRGLKLATALSLSNKFVEGSHNSTVSLTTKNMEVSVATTTKAQIPILRMNFKQELNGNTKSKPTVSSSMEFKYDFNSSMLYSTAKGAVDHKLSLESLTSYFSIESSTKGDVKGSVLSREYSGTIASEANTYLNSKSTRSSVKLQGTSKIDDIWNLEVKENFAGEATLQRIYSLWEHSTKNHLQLEGLFFTNGEHTSKATLELSPWQMSALVQVHASQPSSFHDFPDLGQEVALNANTKNQKIRWKNEVRIHSGSFQSQVELSNDQEKAHLDIAGSLEGHLRFLKNIILPVYDKSLWDFLKLDVTTSIGRRQHLRVSTAFVYTKNPNGYSFSIPVKVLADKFIIPGLKLNDLNSVLVMPTFHVPFTDLQVPSCKLDFREIQIYKKLRTSSFALNLPTLPEVKFPEVDVLTKYSQPEDSLIPFFEITVPESQLTVSQFTLPKSVSDGIAALDLNAVANKIADFELPTIIVPEQTIEIPSIKFSVPAGIVIPSFQALTARFEVDSPVYNATWSASLKNKADYVETVLDSTCSSTVQFLEYELNVLGTHKIEDGTLASKTKGTFAHRDFSAEYEEDGKYEGLQEWEGKAHLNIKSPAFTDLHLRYQKDKKGISTSAASPAVGTVGMDMDEDDDFSKWNFYYSPQSSPDKKLTIFKTELRVRESDEETQIKVNWEEEAASGLLTSLKDNVPKATGVLYDYVNKYHWEHTGLTLREVSSKLRRNLQNNAEWVYQGAIRQIDDIDVRFQKAASGTTGTYQEWKDKAQNLYQELLTQEGQASFQGLKDNVFDGLVRVTQEFHMKVKHLIDSLIDFLNFPRFQFPGKPGIYTREELCTMFIREVGTVLSQVYSKVHNGSEILFSYFQDLVITLPFELRKHKLIDVISMYRELLKDLSKEAQEVFKAIQSLKTTEVLRNLQDLLQFIFQLIEDNIKQLKEMKFTYLINYIQDEINTIFSDYIPYVFKLLKENLCLNLHKFNEFIQNELQEASQELQQIHQYIMALREEYFDPSIVGWTVKYYELEEKIVSLIKNLLVALKDFHSEYIVSASNFTSQLSSQVEQFLHRNIQEYLSILTDPDGKGKEKIAELSATAQEIIKSQAIATKKIISDYHQQFRYKLQDFSDQLSDYYEKFIAESKRLIDLSIQNYHTFLIYITELLKKLQSTTVMNPYMKLAPGELTIIL

SEQ ID NO: 412 - protein, 692 aa, Artificial Sequence
  PCSK9
MGTVSSRRSWWPLPLLLLLLLLLGPAGARAQEDEDGDYEELVLALRSEEDGLAEAPEHGTTATFHRCAKDPWRLPGTYVVVLKEETHLSQSERTARRLQAQAARRGYLTKILHVFHGLLPGFLVKMSGDLLELALKLPHVDYIEEDSSVFAQSIPWNLERITPPRYRADEYQPPDGGSLVEVYLLDTSIQSDHREIEGRVMVTDFENVPEEDGTRFHRQASKCDSHGTHLAGVVSGRDAGVAKGASMRSLRVLNCQGKGTVSGTLIGLEFIRKSQLVQPVGPLVVLLPLAGGYSRVLNAACQRLARAGVVLVTAAGNFRDDACLYSPASAPEVITVGATNAQDQPVTLGTLGTNFGRCVDLFAPGEDIIGASSDCSTCFVSQSGTSQAAAHVAGIAAMMLSAEPELTLAELRQRLIHFSAKDVINEAWFPEDQRVLTPNLVAALPPSTHGAGWQLFCRTVWSAHSGPTRMATAVARCAPDEELLSCSSFSRSGKRRGERMEAQGGKLVCRAHNAFGGEGVYAIARCCLLPQANCSVHTAPPAEASMGTRVHCHQQGHVLTGCSSHWEVEDLGTHKPPVLRPRGQPNQCVGHREASIHASCCHAPGLECKVKEHGIPAPQEQVTVACEEGWTLTGCSALPGTSHVLGAYAVDNTCVVRSRDVSTTGSTSEGAVTAVAICCRSRHLAQASQELQ

SEQ ID NO: 413 - protein, 308 aa, Artificial Sequence
  LDLRAP1
MDALKSAGRALIRSPSLAKQSWGGGGRHRKLPENWTDTRETLLEGMLFSLKYLGMTLVEQPKGEELSAAAIKRIVATAKASGKKLQKVTLKVSPRGIILTDNLTNQLIENVSIYRISYCTADKMHDKVFAYIAQSQHNQSLECHAFLCTKRKMAQAVTLTVAQAFKVAFEFWQVSKEEKEKRDKASQEGGDVLGARQDCTPSLKSLVATGNLLDLEETAKAPLSTVSANTTNMDEVPRPQALSGSSVVWELDDGLDEAFSRLAQSRTNPQVLDTGLTAQDMHYAQCLSPVDWDKPDSSGTEQDDLFSF

SEQ ID NO: 414 - protein, 651 aa, Artificial Sequence
  ABCG5
MGDLSSLTPGGSMGLQVNRGSQSSLEGAPATAPEPHSLGILHASYSVSHRVRPWWDITSCRQQWTRQILKDVSLYVESGQIMCILGSSGSGKTTLLDAMSGRLGRAGTFLGEVYVNGRALRREQFQDCFSYVLQSDTLLSSLTVRETLHYTALLAIRRGNPGSFQKKVEAVMAELSLSHVADRLIGNYSLGGISTGERRRVSIAAQLLQDPKVMLFDEPTTGLDCMTANQIVVLLVELARRNRIVVLTIHQPRSELFQLFDKIAILSFGELIFCGTPAEMLDFFNDCGYPCPEHSNPFDFYMDLTSVDTQSKEREIETSKRVQMIESAYKKSAICHKTLKNIERMKHLKTLPMVPFKTKDSPGVFSKLGVLLRRVTRNLVRNKLAVITRLLQNLIMGLFLLFFVLRVRSNVLKGAIQDRVGLLYQFVGATPYTGMLNAVNLFPVLRAVSDQESQDGLYQKWQMMLAYALHVLPFSVVATMIFSSVCYWTLGLHPEVARFGYFSAALLAPHLIGEFLTLVLLGIVQNPNIVNSVVALLSIAGVLVGSGFLRNIQEMPIPFKIISYFTFQKYCSEILVVNEFYGLNFTCGSSNVSVTTNPMCAFTQGIQFIEKTCPGATSRFTMNFLILYSFIPALVILGIVVFKIRDHLISR

SEQ ID NO: 415 - protein, 673 aa, Artificial Sequence
  ABCG8
MAGKAAEERGLPKGATPQDTSGLQDRLFSSESDNSLYFTYSGQPNTLEVRDLNYQVDLASQVPWFEQLAQFKMPWTSPSCQNSCELGIQNLSFKVRSGQMLAIIGSSGCGRASLLDVITGRGHGGKIKSGQIWINGQPSSPQLVRKCVAHVRQHNQLLPNLTVRETLAFIAQMRLPRTFSQAQRDKRVEDVIAELRLRQCADTRVGNMYVRGLSGGERRRVSIGVQLLWNPGILILDEPTSGLDSFTAHNLVKTLSRLAKGNRLVLISLHQPRSDIFRLFDLVLLMTSGTPIYLGAAQHMVQYFTAIGYPCPRYSNPADFYVDLTSIDRRSREQELATREKAQSLAALFLEKVRDLDDFLWKAETKDLDEDTCVESSVTPLDTNCLPSPTKMPGAVQQFTTLIRRQISNDFRDLPTLLIHGAEACLMSMTIGFLYFGHGSIQLSFMDTAALLFMIGALIPFNVILDVISKCYSERAMLYYELEDGLYTTGPYFFAKILGELPEHCAYIIIYGMPTYWLANLRPGLQPFLLHFLLVWLVVFCCRIMALAAAALLPTFHMASFFSNALYNSFYLAGGFMINLSSLWTVPAWISKVSFLRWCFEGLMKIQFSRRTYKMPLGNLTIAVSGDKILSVMELDSYPLYAIYLIVIGLSGGFMVLYYVSLRFIKQKPSQDW

SEQ ID NO: 416 - protein, 440 aa, Artificial Sequence
  LCAT
MGPPGSPWQWVTLLLGLLLPPAAPFWLLNVLFPPHTTPKAELSNHTRPVILVPGCLGNQLEAKLDKPDVVNWMCYRKTEDFFTIWLDLNMFLPLGVDCWIDNTRVVYNRSSGLVSNAPGVQIRVPGFGKTYSVEYLDSSKLAGYLHTLVQNLVNNGYVRDETVRAAPYDWRLEPGQQEEYYRKLAGLVEEMHAAYGKPVFLIGHSLGCLHLLYFLLRQPQAWKDRFIDGFISLGAPWGGSIKPMLVLASGDNQGIPIMSSIKLKEEQRITTTSPWMFPSRMAWPEDHVFISTPSFNYTGRDFQRFFADLHFEEGWYMWLQSRDLLAGLPAPGVEVYCLYGVGLPTPRTYIYDHGFPYTDPVGVLYEDGDDTVATRSTELCGLWQGRQPQPVHLLPLHGIQHLNMVFSNLTLEHINAILLGAYRQGPPASPTASPEPPPPE

SEQ ID NO: 417 - protein, 1064 aa, Artificial Sequence
  SPINK5
MKIATVSVLLPLALCLIQDAASKNEDQEMCHEFQAFMKNGKLFCPQDKKFFQSLDGIMFINKCATCKMILEKEAKSQKRARHLARAPKATAPTELNCDDFKKGERDGDFICPDYYEAVCGTDGKTYDNRCALCAENAKTGSQIGVKSEGECKSSNPEQDVCSAFRPFVRDGRLGCTRENDPVLGPDGKTHGNKCAMCAELFLKEAENAKREGETRIRRNAEKDFCKEYEKQVRNGRLFCTRESDPVRGPDGRMHGNKCALCAEIFKQRFSEENSKTDQNLGKAEEKTKVKREIVKLCSQYQNQAKNGILFCTRENDPIRGPDGKMHGNLCSMCQAYFQAENEEKKKAEARARNKRESGKATSYAELCSEYRKLVRNGKLACTRENDPIQGPDGKVHGNTCSMCEVFFQAEEEEKKKKEGKSRNKRQSKSTASFEELCSEYRKSRKNGRLFCTRENDPIQGPDGKMHGNTCSMCEAFFQQEERARAKAKREAAKEICSEFRDQVRNGTLICTREHNPVRGPDGKMHGNKCAMCASVFKLEEEEKKNDKEEKGKVEAEKVKREAVQELCSEYRHYVRNGRLPCTRENDPIEGLDGKIHGNTCSMCEAFFQQEAKEKERAEPRAKVKREAEKETCDEFRRLLQNGKLFCTRENDPVRGPDGKTHGNKCAMCKAVFQKENEERKRKEEEDQRNAAGHGSSGGGGGNTQDECAEYREQMKNGRLSCTRESDPVRDADGKSYNNQCTMCKAKLEREAERKNEYSRSRSNGTGSESGKDTCDEFRSQMKNGKLICTRESDPVRGPDGKTHGNKCTMCKEKLEREAAEKKKKEDEDRSNTGERSNTGERSNDKEDLCREFRSMQRNGKLICTRENNPVRGPYGKMHINKCAMCQSIFDREANERKKKDEEKSSSKPSNNAKDECSEFRNYIRNNELICPRENDPVHGADGKFYTNKCYMCRAVFLTEALERAKLQEKPSHVRASQEEDSPDSFSSLDSEMCKDYRVLPRIGYLCPKDLKPVCGDDGQTYNNPCMLCHENLIRQTNTHIRSTGKCEESSTPGTTAASMPPSDE

SEQ ID NO: 418 - protein, 722 aa, Artificial Sequence
  GNE
MEKNGNNRKLRVCVATCNRADYSKLAPIMFGIKTEPEFFELDVVVLGSHLIDDYGNTYRMIEQDDFDINTRLHTIVRGEDEAAMVESVGLALVKLPDVLNRLKPDIMIVHGDRFDALALATSAALMNIRILHIEGGEVSGTIDDSIRHAITKLAHYHVCCTRSAEQHLISMCEDHDRILLAGCPSYDKLLSAKNKDYMSIIRMWLGDDVKSKDYIVALQHPVTTDIKHSIKMFELTLDALISFNKRTLVLFPNIDAGSKEMVRVMRKKGIEHHPNFRAVKHVPFDQFIQLVAHAGCMIGNSSCGVREVGAFGTPVINLGTRQIGRETGENVLHVRDADTQDKILQALHLQFGKQYPCSKIYGDGNAVPRILKFLKSIDLQEPLQKKFCFPPVKENISQDIDHILETLSALAVDLGGTNLRVAIVSMKGEIVKKYTQFNPKTYEERINLILQMCVEAAAEAVKLNCRILGVGISTGGRVNPREGIVLHSTKLIQEWNSVDLRTPLSDTLHLPVWVDNDGNCAALAERKFGQGKGLENFVTLITGTGIGGGIIHQHELIHGSSFCAAELGHLVVSLDGPDCSCGSHGCIEAYASGMALQREAKKLHDEDLLLVEGMSVPKDEAVGALHLIQAAKLGNAKAQSILRTAGTALGLGVVNILHTMNPSLVILSGVLASHYIHIVKDVIRQQALSSVQDVDVVVSDLVDPALLGAASMVLDYTTRRIY

SEQ ID NO: 419 - protein, 245 aa, Artificial Sequence
  Anti-CD19 scFv (FMC63)
DIQMTQTTSSLSASLGDRVTISCRASQDISKYLNWYQQKPDGTVKLLIYHTSRLHSGVPSRFSGSGSGTDYSLTISNLEQEDIATYFCQQGNTLPYTFGGGTKLEITGSTSGSGKPGSGEGSTKGEVKLQESGPGLVAPSQSLSVTCTVSGVSLPDYGVSWIRQPPRKGLEWLGVIWGSETTYYNSALKSRLTIIKDNSKSQVFLKMNSLQTDDTAIYYCAKHYYYGGSYAMDYWGQGTSVTVSS

SEQ ID NO: 420 - protein, 242 aa, Artificial Sequence
  Anti-CD19 scFv (FMC63)
DIQMTQTTSSLSASLGDRVTISCRASQDISKYLNWYQQKPDGTVKLLIYHTSRLHSGVPSRFSGSGSGTDYSLTISNLEQEDIATYFCQQGNTLPYTFGGGTKLEITGGGGSGGGGSGGGGSEVKLQESGPGLVAPSQSLSVTCTVSGVSLPDYGVSWIRQPPRKGLEWLGVIWGSETTYYNSALKSRLTIIKDNSKSQVFLKMNSLQTDDTAIYYCAKHYYYGGSYAMDYWGQGTSVTVSS

SEQ ID NO: 421 - protein, 12 aa, Artificial Sequence
  IgG4 Hinge
ESKYGPPCPPCP

SEQ ID NO: 422 - protein, 25 aa, Artificial Sequence
  CD8 Hinge
TTTPAPRPPTPAPTIASQPLSLRPE

SEQ ID NO: 423 - protein, 39 aa, Artificial Sequence
  CD28
IEVMYPPPYLDNEKSNGTIIHVKGKHLCPSPLFPGPSKP

SEQ ID NO: 424 - protein, 44 aa, Artificial Sequence
  CD8
ACRPAAGGAVHTRGLDFACDIYIWAPLAGTCGVLLLSLVITLYC

SEQ ID NO: 425 - protein, 27 aa, Artificial Sequence
  CD28
FWVLVVVGGVLACYSLLVTVAFIIFWV

SEQ ID NO: 426 - protein, 27 aa, Artificial Sequence
  CD28
FWVLVVVGGVLACYSLLVTVAFIIFWV

SEQ ID NO: 427 - protein, 41 aa, Artificial Sequence
  CD28
RSKRSRLLHSDYMNMTPRRPGPTRKHYQPYAPPRDFAAYRS

SEQ ID NO: 428 - protein, 42 aa, Artificial Sequence
  4-1BB
KRGRKKLLYIFKQPFMRPVQTTQEEDGCSCRFPEEEEGGCEL

SEQ ID NO: 429 - protein, 112 aa, Artificial Sequence
  CD3zeta
RVKFSRSADAPAYQQGQNQLYNELNLGRREEYDVLDKRRGRDPEMGGKPRRKNPQEGLYNELQKDKMAEAYSEIGMKGERRRGKGHDGLYQGLSTATKDTYDALHMQALPPR

SEQ ID NO: 430 - protein, 112 aa, Artificial Sequence
  CD3zeta
RVKFSRSADAPAYKQGQNQLYNELNLGRREEYDVLDKRRGRDPEMGGKPRRKNPQEGLYNELQKDKMAEAYSEIGMKGERRRGKGHDGLYQGLSTATKDTYDALHMQALPPR

1. A targeted lipid particle, comprising:
(a) a lipid bilayer enclosing a lumen,
(b) a henipavirus F protein molecule or biologically active portion thereof; and
(c) a targeted envelope protein comprising (i) a henipavirus envelope attachment glycoprotein G (G protein) or a biologically active portion thereof and (ii) single domain antibody (sdAb) variable domain, wherein the sdAb variable domain is attached to the C-terminus of the G protein or the biologically active portion thereof and/or wherein the sdAb is attached to the G protein or the biologically active portion thereof via a peptide linker, wherein the sdAb binds to a cell surface molecule of a target cell,
wherein the F protein molecule or the biologically active portion thereof and the targeted envelope protein are embedded in the lipid bilayer.

2. The targeted lipid particle of claim 1, wherein the cell surface molecule is a protein, glycan, lipid or low molecular weight molecule.

3. The targeted lipid particle of claim 1, wherein the target cell is selected from the group consisting of tumor-infiltrating lymphocytes, T cells, neoplastic or tumor cells, virus-infected cells, stem cells, central nervous system (CNS) cells, hematopoeietic stem cells (HSCs), liver cells and fully differentiated cells.

4. The targeted lipid particle of claim 1, wherein the target cell is selected from the group consisting of a CD3+ T cell, a CD4+ T cell, a CD8+ T cell, a hepatocyte, a haematopoietic stem cell, a CD34+ haematopoietic stem cell, a CD105+ haematopoietic stem cell, a CD117+ haematopoietic stem cell, a CD105+ endothelial cell, a B cell, a CD20+ B cell, a CD19+ B cell, a cancer cell, a CD133+ cancer cell, an EpCAM+ cancer cell, a CD19+ cancer cell, a Her2/Neu+ cancer cell, a GluA2+ neuron, a GluA4+ neuron, a NKG2D+ natural killer cell, a SLC1A3+ astrocyte, a SLC7A10+ adipocyte, and a CD30+ lung epithelial cell.

5. The targeted lipid particle of claim 1, wherein the single domain antibody binds to an antigen or portion thereof present on a hepatocyte.

6. The targeted lipid particle of claim 1, wherein the cell surface molecule or antigen is selected from the group consisting of ASGR1, ASGR2 and TM4SF.

7. The targeted lipid particle of claim 1, wherein the single domain antibody binds to an antigen or portion thereof present on a T cell.

8. The targeted lipid particle of claim 1, wherein the cell surface molecule or antigen is CD8 or CD4.

9. The targeted lipid particle of claim 1, wherein the cell surface molecule or antigen is low density lipoprotein receptor (LDL-R).

10. A targeted lipid particle, comprising:
(a) a lipid bilayer enclosing a lumen,
(b) a henipavirus F protein molecule or biologically active portion thereof; and
(c) a targeted envelope protein comprising (i) a henipavirus envelope attachment glycoprotein G (G protein) or a biologically active portion thereof and (ii) a binding domain, wherein the binding domain is attached to the C-terminus of the G protein or the biologically active portion thereof, and wherein the binding domain binds a cell surface molecule selected from the group consisting of ASGR1, ASGR2, TM4SF5, CD8, CD4 and low density lipoprotein receptor (LDL-R),
wherein the F protein molecule or the biologically active portion thereof and the targeted envelope protein are embedded in the lipid bilayer.

11-12. (canceled)

13. The targeted lipid particle of claim 1, wherein the lipid particle is a lentiviral vector.

14. A lentiviral vector, comprising:
(a) a henipavirus F protein molecule or biologically active portion thereof; and
(b) a targeted envelope protein comprising (i) a henipavirus envelope attachment glycoprotein G (G protein) or a biologically active portion thereof and (ii) a binding domain, wherein the binding domain is attached to the C-terminus of the G protein or the biologically active portion thereof, and wherein the binding domain binds CD4; and
(c) a cargo comprising nucleic acid encoding a chimeric antigen receptor (CAR), wherein the CAR comprises (i) an extracellular antigen binding domain that binds CD19, (ii) a transmembrane domain and (iii) an intracellular signaling region comprising a CD3zeta signaling domain.

15-16. (canceled)

17. A lentiviral vector, comprising:
(a) a henipavirus F protein molecule or biologically active portion thereof; and
(b) a targeted envelope protein comprising (i) a henipavirus envelope attachment glycoprotein G (G protein) or a biologically active portion thereof and (ii) a binding domain, wherein the binding domain is attached to the C-terminus of the G protein or the biologically active portion thereof, and wherein the binding domain binds a cell surface molecule selected from the group consisting of ASGR1, ASGR2 and TM4SF5.

18-19. (canceled)

20. The lentiviral vector of claim 14, wherein the binding domain is attached to the G protein via a linker.

21. The targeted lipid particle of claim 10, wherein the binding domain is a single domain antibody or is a single chain variable fragment (scFv).

22-23. (canceled)

24. The targeted lipid particle of claim 1, wherein the G protein or the biologically active portion thereof is a wild-type Nipah virus G (NiV-G) protein or a Hendra virus G protein, or is a functionally active variant or biologically active portion thereof.

25-33. (canceled)

34. The targeted lipid particle of claim 1, wherein the mutant NiV-G protein or the biologically active portion has the amino acid sequence set forth in SEQ ID NO: 16 or an amino acid sequence having at or about 80% sequence identity to SEQ ID NO:16.

35. The targeted lipid particle of claim 1, wherein the F protein or the biologically active portion thereof is a wild-type Nipah virus F (NiV-F) protein or a Hendra virus F protein or is a functionally active variant or biologically active portion thereof.

36-39. (canceled)

40. The targeted lipid particle of claim 1, wherein the NiV-F protein is a biologically active portion thereof that has a 22 amino acid truncation at or near the C-terminus of the wild-type NiV-F protein (SEQ ID NO:2).

41. The targeted lipid particle of claim 1, wherein the NiV-F protein or the biologically active portion has the sequence set forth in SEQ ID NO:23 or an amino acid sequence that is encoded by a sequence of nucleotides encoding a sequence having at or about 80% sequence identity to SEQ ID NO:23.

42. The targeted lipid particle of claim 1, wherein the F protein comprises the sequence set forth in SEQ ID NO:23 and the G protein comprises the sequence set forth in SEQ ID NO:16.

43-48. (canceled)

49. The targeted lipid particle of claim 1, wherein the lipid particle further comprises an exogenous agent.

50-54. (canceled)

55. The targeted lipid particle of claim 10, wherein the membrane protein is a chimeric antigen receptor (CAR).

56. (canceled)

57. The targeted lipid particle of claim 10, wherein the exogenous agent is a nucleic acid comprising a payload gene for correcting a genetic deficiency.

58. A polynucleotide comprising a nucleic acid sequence encoding:
(i) a henipavirus envelope attachment glycoprotein G (G protein) or a biologically active portion thereof and (ii) a single domain antibody (sdAb) variable domain, wherein the sdAb variable domain is attached to the C-terminus of the G protein or the biologically active portion thereof; or
(i) a henipavirus envelope attachment glycoprotein G (G protein) or a biologically active portion thereof and (ii) a binding domain that binds a cell surface molecule selected from the group consisting of ASGR1, ASGR2, TM4SF5, CD4, CD8, and low density lipoprotein receptor (LDL-R).

59-90. (canceled)

91. A vector comprising the polynucleotide of claim 58.

92. (canceled)

93. A plasmid comprising the polynucleotide of claim 58.

94. (canceled)

95. A cell comprising the vector of claim 91.

96. A method of making a targeted lipid particle comprising a henipavirus F protein molecule or biologically active portion thereof and a targeted envelope protein comprising a henipavirus envelope attachment glycoprotein G (G protein) or a biologically active portion thereof and a single domain antibody (sdAb) variable domain, the method comprising:
a) providing a cell that comprises a nucleic acid encoding a henipavirus F protein molecule or biologically active portion thereof and a nucleic acid encoding a targeted envelope protein, the targeted envelope protein comprising a henipavirus envelope attachment glycoprotein G (G protein) or a biologically active portion thereof and a single domain antibody (sdAb) variable domain;
b) culturing the cell under conditions that allow for production of a targeted lipid particle, and
c) separating, enriching, or purifying the targeted lipid particle from the cell, thereby making the targeted lipid particle.

97. A method of making a pseudotyped lentiviral vector, the method comprising:
a) providing a producer cell that comprises a lentiviral viral nucleic acid(s), a nucleic acid encoding a henipavirus F protein molecule or biologically active portion thereof, and a nucleic acid encoding a targeted envelope protein, said targeted envelope protein comprising a henipavirus envelope attachment glycoprotein G (G protein) or a biologically active portion thereof and a single domain antibody;
b) culturing the cell under conditions that allow for production of the lentiviral vector, and
c) separating, enriching, or purifying the lentiviral vector from the cell, thereby making the pseudotyped lentiviral vector.

98. A method of making a targeted lipid particle comprising a henipavirus F protein molecule or biologically active portion thereof and a targeted envelope protein comprising a henipavirus envelope attachment glycoprotein G (G protein) or a biologically active portion thereof and a binding domain, the method comprising:
a) providing a cell that comprises a nucleic acid encoding a henipavirus F protein molecule or biologically active portion thereof and a nucleic acid encoding a targeted envelope protein, the targeted envelope protein comprising a henipavirus envelope attachment glycoprotein G (G protein) or a biologically active portion thereof and binding domain, wherein the binding domain:
(i) binds a cell surface molecule selected from the group consisting of ASGR1, ASGR2, and TM4SF5;
(ii) binds a cell surface molecule selected from the group consisting of CD4 or CD8; or
(iii) binds a cell surface molecule that is low density lipoprotein receptor (LDL-R);
b) culturing the cell under conditions that allow for production of a targeted lipid particle, and
c) separating, enriching, or purifying the targeted lipid particle from the cell, thereby making the targeted lipid particle,
wherein the targeted lipid particle is a pseudotyped lentiviral vector.

99-105. (canceled)

106. A producer cell comprising the polynucleotide of claim 58.

107. The producer cell of claim 106, further comprising nucleic acid encoding a henipavirus F protein or a biologically active portion thereof.

108. (canceled)

109. A producer cell comprising (i) a viral nucleic acid(s) and (ii) nucleic acid encoding a henipavirus F protein molecule or biologically active portion thereof and (iii) a nucleic acid encoding a targeted envelope protein comprising a henipavirus envelope attachment glycoprotein G (G protein) or a biologically active portion thereof and a single domain antibody (sdAb) variable domain.

110-113. (canceled)

114. A producer cell comprising (i) a viral nucleic acid(s) and (ii) nucleic acid encoding a henipavirus F protein molecule or biologically active portion thereof and (iii) a nucleic acid encoding a targeted envelope protein comprising a henipavirus envelope attachment glycoprotein G (G protein) or a biologically active portion thereof and a binding domain, wherein the binding domain:
(i) binds a cell surface molecule selected from the group consisting of ASGR1, ASGR2, and TM4SF5;
(ii) binds a cell surface molecule selected from the group consisting of CD4 or CD8; or
(iii) binds a cell surface molecule that is low density lipoprotein receptor (LDL-R).

115-123. (canceled)

124. A targeted lipid particle produced by the method of claim 96.

125-126. (canceled)

127. A composition comprising a plurality of targeted lipid particles of claim 1.

128-129. (canceled)

130. A method of transducing a cell comprising transducing a cell with a lentiviral vector of claim 13.

131. (canceled)

132. A method of delivering an exogenous agent to a subject, the method comprising administering to the subject the targeted lipid particle of claim 49, wherein the targeted lipid particle comprises the exogenous agent.

133. A method of delivering an exogenous agent to a subject, the method comprising administering to the subject the composition of claim 127, wherein targeted lipid particles of the plurality comprise the exogenous agent.

134. A method of delivering a chimeric antigen receptor (CAR) to a cell, comprising contacting a cell with the lentiviral vector of claim 14, wherein the lentiviral vector comprises a nucleic acid encoding the CAR.

135. A method of delivering a chimeric antigen receptor (CAR) to a cell, comprising contacting a cell with the composition of claim 127 wherein targeted lipid particles of the plurality comprise a nucleic acid encoding the CAR.

136. A method of delivering an exogenous agent to a hepatocyte, comprising contacting a cell with the lentiviral vector of claim 17.

137. A method of delivering an exogenous agent to a hepatocyte, comprising contacting a cell with the composition of claim 127, wherein targeted lipid particles of the plurality comprise an exogenous agent for delivery to the hepatocyte.

138. (canceled)

139. A method of treating a disease or disorder in a subject, the method comprising administering to the subject the composition of claim 127.

140. A method of fusing a mammalian cell to a targeted lipid particle, the method comprising administering to the subject the composition of claim 127.

141. (canceled)
